(19) United States
(12) Patent Application Publication
(10) Pub. No.: US 2024/0398862 A1
(43) Pub. Date: Dec. 5, 2024

(54) GENE TARGETS FOR MANIPULATING T CELL BEHAVIOR

(71) Applicants: THE REGENTS OF THE UNIVERSITY OF CALIFORNIA, Oakland, CA (US); THE BOARD OF TRUSTEES OF THE LELAND STANFORD JUNIOR UNIVERSITY, Stanford, CA (US)

(72) Inventors: Jacob FREIMER, Oakland, CA (US); Alexander MARSON, Oakland, CA (US); Jonathan PRITCHARD, stanford, CA (US); Oren SHAKED, Oakland, CA (US)

(21) Appl. No.: 17/754,848

(22) PCT Filed: Oct. 15, 2020
(86) PCT No.: PCT/US2020/055764

§ 371 Date: Apr. 13, 2022

Related U.S. Application Data
(60) Provisional application No. 62/915,494, filed on Oct. 15, 2019.

(51) Int. Cl. A61K 35/17; A61K 39/00; C12N 5/0783

(52) U.S. Cl. CPC A61K 35/17; A61K 39/4611; C12N 5/0637; C12N 2510/00

(57) ABSTRACT

Provided herein are compositions and methods for modifying T cells. The disclosure is based, in part, on the use of sgRNA lentiviral infection with Cas9 protein electroporation (SLICE), to identify regulators of IL2RA, IL-2, CTLA4, arnd FOXP3 in effector T cells. IL2RA, IL-2, CTLA4, and FOXP3 are key genes in immune regulation that have been implicated in autoimmune disease and cancer. Therefore, modulating expression of these genes in T cells, for example, effector T cells or regulatory T cells, could have therapeutic applications.

### PRIOR RELATED APPLICATION

[0001] This application claims the benefit of and priority to U.S. Provisional Application No. 62/915,494, filed on Oct. 15, 2019, which is hereby incorporated by reference in its entirety.

### STATEMENT AS TO RIGHTS TO INVENTIONS MADE UNDER FEDERALLY SPONSORED RESEARCH AND DEVELOPMENT

[0002] This invention was made with government support under grant no. R01 HG008140 awarded by the National Institutes of Health. The government has certain rights in the invention.

### INCORPORATION BY REFERENCE OF SEQUENCE LISTING

[0003] This application contains a Sequence Listing in computer readable form (filename: 081906_1211947_SeqList.txt; Size: 491 KB; created Oct. 12, 2020); which is incorporated by reference in its entirety and forms part of the disclosure.

### BACKGROUND OF THE INVENTION

[0004] Decades of work in animal models and cell lines have identified regulators of T cell suppression and activation, but systematic strategies to comprehensively analyze the function of genes that regulate human T cell responses are still lacking. T cells play a role in regulating the immune response in cancer as well as other diseases, for example, autoimmune diseases. Methods of modifying T cells for the treatment of autoimmune diseases or cancer have great therapeutic potential.

### BRIEF SUMMARY OF THE INVENTION

[0005] The disclosure is based, in part, on the use of sgRNA lentiviral infection with Cas9 protein electroporation (SLICE), to identify regulators of IL2RA, IL-2, CTLA4, and FOXP3 in effector T cells. IL2RA, IL-2, CTLA4, and FOXP3 are key genes in immune regulation that have been implicated in autoimmune disease and cancer. Therefore, modulating expression of these genes in T cells, for example, effector T cells or regulatory T cells, could have therapeutic applications.

[0006] The present invention is directed to compositions and methods for modifying T cells. The inventors have identified nuclear factors that influence expression of IL2RA, IL-2, CTLA4 and FOXP3. T cells can be modified by inhibiting and/or overexpressing one or more of these nuclear factors to manipulate immune cell activity. In some examples, modified T cells are used to treat autoimmune disorders, assist in organ transplantation, to treat graft versus host disease, or inflammation. Examples of autoimmune/inflammatory diseases include but are not limited to: type 1 diabetes, rheumatoid arthritis, inflammatory bowel disease, multiple sclerosis, and multi-organ autoimmune syndromes. In other examples, modified T cells are used to treat cancer. For example, in some embodiments, T cells can be used to target hematological malignancies or solid tumors. Examples of such cancers include but are not limited to, ovarian cancer breast cancers, colon cancers, lung cancers, prostate cancers, liver cancers, bone and soft tissue cancers, head and neck cancers, melanomas and other skin cancers, brain cancers, leukemias, lymphomas.

[0007] Provided herein is a T cell comprising: (a) a genetic modification or heterologous polynucleotide that inhibits expression of a nuclear factor set forth in Table 1, Table 2, Table 3, Table 4, Table 5, Table 6, Table 7, Table 8, Table 9, Table 10, Table 11, Table 12, Table 13 or Table 14; and/or (b) a heterologous polynucleotide that encodes a nuclear factor set forth in Table 1, Table 2, Table 3, Table 4, Table 5, Table 6, Table 7, Table 8, Table 9, Table 10, Table 11, Table 12, Table 13 or Table 14.

[0008] In some embodiments, the T cell comprises (a) a genetic modification or heterologous polynucleotide that inhibits expression of CBFB, MYB, ZNF217, FOXK1, FLI1, FOS, SATB1, IL2, ATXN7L3, MTF1, RELA, IRF1, BCL11B, STAT3, MED30, MED14, MED11, IKZF3, KMT2A, IKZF1, MED12, TAF5L, PTEN, IRF4, FOXO1, FOXP1, CTLA4, ETS1, MYBL2, TP53, MBD2, ZBTB7A, DNMT1, HIVEP2, KLF2, TFDP1, SMARCB1, MAF, FOXP3, GATA3, STAT5B, STAT5A, PRDM1, TNFAIP3, RXRB, TFDP1, CXXC1, NFATC2, MAF, IRF2, ZBTB11, JAK3, YY1, IL2RA or GTF2B; and/or (b) a heterologous polynucleotide that encodes CBFB, MYB, ZNF217, FOXK1, FLI1, FOS, SATB1, IL2, ATXN7L3, MTF1, RELA, IRF1, BCL11B, STAT3, MED30, MED14, MED11, IKZF3, KMT2A, IKZF1, MED12, TAF5L, PTEN, IRF4, FOXO1, FOXP1, CTLA4, ETS1, MYBL2, TP53, MBD2, ZBTB7A, DNMT1, TFDP1, SMARCB1, MAF, FOXP3, GATA3, STAT5B, STAT5A, PRDM1, TNFAIP3, RXRB, TFDP1, CXXC1, NFATC2, MAF, IRF2, ZBTB11, JAK3, YY1, IL2RA or GTF2B.

[0009] In some embodiments, the T cell comprises a genetic modification or heterologous polynucleotide that inhibits expression of a nuclear factor set forth in Table 1; and/or a heterologous polynucleotide that encodes a nuclear factor set forth in Table 2, wherein expression of CTLA4 is increased in the T cell relative to expression of CTLA4 in a T cell not comprising the genetic modification or heterologous polynucleotide.

[0010] In some embodiments, the T cell comprises: (a) a genetic modification or a heterologous polynucleotide that inhibits expression of CBFB, MYB, ZNF217, FOXK1, FLI1, FOS, SATB1, IL2 or ATXN7L3, wherein expression of CTLA4 is increased in the T cell relative to expression of CTLA4 in a T cell not comprising the genetic modification or the heterologous polynucleotide that inhibits expression of CBFB, MYB, ZNF217, FOXK1, FLI1, FOS, SATB1, IL2 or ATXN7L3; and/or (b) a heterologous polynucleotide that encodes MTF1, RELA, IRF1, BCL11B, STAT3, MED30, MED14, MED11, IKZF3, KMT2A, IKZF1, MED12, TAF5L, PTEN, IRF4, FOXO1, FOXP1 or CTLA4, wherein expression of CTLA4 is increased in the T cell relative to expression of CTLA4 in a T cell not comprising the heterologous polynucleotide that encodes MTF1, RELA, IRF1, BCL11B, STAT3, MED30, MED14, MED11, IKZF3, KMT2A, IKZF1, MED12, TAF5L, PTEN, IRF4, FOXO1, FOXP1 or CTLA4.

[0011] In some embodiments, the T cell comprises a genetic modification or heterologous polynucleotide that inhibits expression of a nuclear factor set forth in Table 2, and/or a heterologous polynucleotide that encodes a nuclear factor set forth in Table 1, and wherein expression of CTLA4 is decreased in the T cell relative to expression of CTLA4 in a T cell not comprising the genetic modification or heterologous polynucleotide.

[0012] In some embodiments, the T cell comprises: (a) a genetic modification or heterologous polynucleotide that inhibits expression of MTF1, RELA, IRF1, BCL11B, STAT3, MED30, MED14, MED11, IKZF3, KMT2A, IKZF1, MED12, TAF5L, PTEN, IRF4, FOXO1, FOXP1 or CTLA4, wherein expression of CTLA4 is decreased in the T cell relative to expression of CTLA4 in a T cell not comprising the genetic modification or the heterologous polynucleotide that inhibits expression of MTF1, RELA, IRF1, BCL11B, STAT3, MED30, MED14, MED11, IKZF3, KMT2A, IKZF1, MED12, TAF5L, PTEN, IRF4, FOXO1, FOXP1 or CTLA4; and/or (b) a heterologous polynucleotide that encodes CBTB, MYB, ZNF217, FOXK1, FLI1, FOX, SATB1, IL2 or ATXN7L3, wherein expression of CTLA4 is decreased in the T cell relative to expression of CTLA4 in a T cell not comprising the heterologous polynucleotide that encodes CBTB, MYB, ZNF217, FOXK1, FLI1, FOX, SATB1, IL2 or ATXN7L3.

[0013] In some embodiments, the T cell comprises a genetic modification or heterologous polynucleotide that inhibits expression of a nuclear factor set forth in Table 3 and/or a heterologous polynucleotide that encodes a nuclear factor set forth in Table 4, and wherein expression of FOXP3 is increased in the T cell relative to expression of FOXP3 in a T cell not comprising the genetic modification or heterologous polynucleotide.

[0014] In some embodiments, the T cell comprises: (a) a genetic modification or heterologous polynucleotide that inhibits expression of ETS1, MYBL2, MYB, TP53, FLI1, SATB1, MBD2, ZBTB7A, DNMT1, TFDP1, SMARCB1 or MAF, wherein expression of FOXP3 is increased in the T cell relative to expression of FOXP3 in a T cell not comprising the genetic modification or heterologous polynucleotide that inhibits expression of ETS1, MYBL2, MYB, TP53, FLI1, SATB1, MBD2, ZBTB7A, DNMT1, TFDP1, SMARCB1 or MAF; and/or (b) a heterologous polynucleotide that encodes a TAF5L, FOXP3, GATA3, STAT5B, FOXP1, STAT5A, PTEN or FOXO1, wherein expression of FOXP3 is increased in the T cell relative to expression of FOXP3 in a T cell not comprising a heterologous polynucleotide that encodes a TAF5L, FOXP3, GATA3, STAT5B, FOXP1, STAT5A, PTEN or FOXO1.

[0015] In some embodiments, the T cell comprises a genetic modification or heterologous polynucleotide that inhibits expression of a nuclear factor set forth in Table 4, and/or a heterologous polynucleotide that encodes a nuclear factor set forth in Table 3, and wherein expression of FOXP3 is decreased in the T cell relative to expression of FOXP3 in a T cell not comprising the genetic modification or heterologous polynucleotide.

[0016] In some embodiments, the T cell comprises: (a) a genetic modification or heterologous polynucleotide that inhibits expression of TAF5L, FOXP3, GATA3, STAT5B, FOXP1, STAT5A, PTEN or FOXO1, wherein expression of FOXP3 is decreased in the T cell relative to expression of FOXP3 in a T cell not comprising the genetic modification or heterologous polynucleotide that inhibits expression of TAF5L, FOXP3, GATA3, STAT5B, FOXP1, STAT5A, PTEN or FOXO1; and/or (b) a heterologous polynucleotide that encodes ETS1, MYBL2, MYB, TP53, FLI1, SATB1, MBD2, ZBTB7A, DNMT1, TFDP1, SMARCB1 or MAF, wherein expression of FOXP3 is decreased in the T cell relative to expression of FOXP3 in a T cell not comprising a heterologous polynucleotide that encodes ETS1, MYBL2, MYB, TP53, FLI1, SATB1, MBD2, ZBTB7A, DNMT1, TFDP1, SMARCB1 or MAF.

[0017] In some embodiments, the T cell comprises a genetic modification or heterologous polynucleotide that inhibits expression of a nuclear factor set forth in Table 5, and/or a heterologous polynucleotide that encodes a nuclear factor set forth in Table 6, and wherein expression of IL-2 is increased in the T cell relative to expression of IL-2 in a T cell not comprising the genetic modification or heterologous polynucleotide.

[0018] In some embodiments, the T cell comprises: (a) a genetic modification or heterologous polynucleotide that inhibits expression of MED12, FOXP1, PTEN, IKZF1, TAF5L, PRDM1, TFDP1, CXXC1, IKZF3 or TP53, wherein expression of IL-2 is increased in the T cell relative to expression of IL-2 in a T cell not comprising the genetic modification or heterologous polynucleotide that inhibits expression of MED12, FOXP1, PTEN, IKZF1, TAF5L, PRDM1, TFDP1, CXXC1, IKZF3 or TP53; and/or (b) a heterologous polynucleotide that encodes NFATC2, MAF, ZBTB7A, MBD2, GATA3, MED14, IRF2, MED30, ZBTB11, RELA, JAK3, MED11, BCL11B, MTF1, ATXN7L3, YY1, ETS1, IL2, DNMT1, GTF2B or SMARCB1, wherein expression of IL-2 is increased in the T cell relative to expression of IL-2 in a T cell not comprising a heterologous polynucleotide that encodes NFATC2, MAF, ZBTB7A, MBD2, GATA3, MED14, IRF2, MED30, ZBTB11, RELA, JAK3, MED11, BCL11B, MTF1, ATXN7L3, YY1, ETS1, IL2, DNMT1, GTF2B or SMARCB1.

[0019] In some embodiments, the T cell comprises a genetic modification or heterologous polynucleotide that inhibits expression of a nuclear factor set forth in Table 6, and/or a heterologous polynucleotide that encodes a nuclear factor set forth in Table 5, and wherein expression of IL-2 is decreased in the T cell relative to expression of IL-2 in a T cell not comprising the genetic modification or heterologous polynucleotide.

[0020] In some embodiments, the T cell comprises (a) genetic modification or heterologous polynucleotide that inhibits expression of NFATC2, MAF, ZBTB7A, MBD2, GATA3, MED14, IRF2, MED30, ZBTB11, RELA, JAK3, MED11, BCL11B, MTF1, ATXN7L3, YY1, ETS1, IL2, DNMT1, GTF2B or SMARCB1, wherein expression of IL-2 is decreased in the T cell relative to expression of IL-2 in a T cell not comprising the genetic modification or heterologous polynucleotide that inhibits expression of NFATC2, MAF, ZBTB7A, MBD2, GATA3, MED14, IRF2, MED30, ZBTB11, RELA, JAK3, MED11, BCL11B, MTF1, ATXN7L3, YY1, ETS1, IL2, DNMT1, GTF2B or SMARCB1; and/or (b) a heterologous polynucleotide that encodes MED12, FOXP1, PTEN, IKZF1, TAF5L, PRDM1, TFDP1, CXXC1, IKZF3 or TP53, wherein expression of IL-2 is decreased in the T cell relative to expression of IL-2 in a T cell not comprising heterologous polynucleotide that encodes MED12, FOXP1, PTEN, IKZF1, TAF5L, PRDM1, TFDP1, CXXC1, IKZF3 or TP53.

[0021] In some embodiments, the T cell comprises: (a) a genetic modification or heterologous polynucleotide that inhibits expression of a nuclear factor set forth in Table 7, Table 9, Table 11 or Table 13; and/or (b) a heterologous polynucleotide that encodes a nuclear factor set forth in Table 8, Table 10, Table 12, or Table 14 and wherein expression of IL2RA is increased in the T cell relative to expression of IL2RA in a T cell not comprising the genetic modification or heterologous polynucleotide.

[0022] In some embodiments, the T cell comprises: (a) a genetic modification or heterologous polynucleotide that inhibits expression of MED12, CBFB, HIVEP2, KLF2, MYB, FOXK1, ZNF217, IRF2, TNFAIP3, MYC, PRDM1, TFDP1, IRF1, FOXO1, ATXN7L3 or TP53, wherein expression of IL2RA is increased in the T cell relative to expression of IL2RA in a T cell not comprising the genetic modification or heterologous polynucleotide that inhibits expression of MED12, CBFB, HIVEP2, KLF2, MYB, FOXK1, ZNF217, IRF2, TFNAIP3, MYC, PRDM1, TFDP1, IRF1, FOXO1, ATXN7L3 or TP53; and/or (b) a heterologous polynucleotide that encodes IKZF3, YY1, MBD2, IRF4, IKZF1, RXRB, RELA, ETS1, KMT2A, PTEN, JAK3, STAT5A, GATA3, FOXP1, STAT5B, or IL2RA, wherein expression of IL2RA is increased in the T cell relative to expression of IL2RA in a T cell not comprising the heterologous polynucleotide that encodes IKZF3, YY1, MBD2, IRF4, IKZF1, RXRB, RELA, ETS1, KMT2A, PTEN, JAK3, STAT5A, GATA3, FOXP1, STAT5B, or IL2RA.

[0023] In some embodiments, the T cell comprises: (a) a genetic modification or heterologous polynucleotide that inhibits expression of a nuclear factor set forth in Table 8, Table 10, Table 12 or Table 14, and/or a (b) a heterologous polynucleotide that encodes a nuclear factor set forth in Table 7, Table 9, Table 11 or Table 13 and wherein expression of IL2RA is decreased in the T cell relative to expression of IL2RA in a T cell not comprising the genetic modification or heterologous polynucleotide.

[0024] In some embodiments, the T cell comprises: (a) a genetic modification or heterologous polynucleotide that inhibits expression of IKZF3, YY1, MBD2, IRF4, IKZF1, RXRB, RELA, ETS1, KMT2A, PTEN, JAK3, STAT5A, GATA3, FOXP1, STAT5B, or IL2RA, wherein expression of IL2RA is decreased in the T cell relative to expression of IL2RA in a T cell not comprising the genetic modification or heterologous polynucleotide that inhibits expression of IKZF3, YY1, MBD2, IRF4, IKZF1, RXRB, RELA, ETS1, KMT2A. PTEN, JAK3, STAT5A, GATA3, FOXP1, STAT5B, or IL2RA; and/or (b) a heterologous polynucleotide that encodes MED12, CBFB, HIVEP2, KLF2, MYB, FOXK1, ZNF217, IRF2, TFNAIP3, MYC, PRDM1, TFDP1, IRF1, FOXO1, ATXN7L3 or TP53, wherein expression of IL2RA is decreased in the T cell relative to expression of IL2RA in a T cell not comprising heterologous polynucleotide that encodes MED12, CBFB, HIVEP2, KLF2, MYB, FOXK1, ZNF217, IRF2, TFNAIP3, MYC, PRDM1, TFDP1, IRF1, FOXO1, ATXN7L3 or TP53.

[0025] In some embodiments, the T cell is a Treg cell. In some embodiments, the T cell is a conventional T cell, for example, a CD8+, CD4+ T cell or a CD4+CD8+ cell. Also provided, are populations of cells comprising any of the genetically modified T cells provided herein.

[0026] Also provided is a method of making a modified T cell, the method comprising: inhibiting expression of one or more nuclear factors set forth in Table 1, Table 2, Table 3, Table 4, Table 5, Table 6, Table 7, Table 8, Table 9, Table 10, Table 11, Table 12, Table 13 or Table 14 and/or overexpressing one or more nuclear factors set forth in Table 1, Table 2, Table 3, Table 4, Table 5, Table 6, Table 7, Table 8, Table 9, Table 10, Table 11, Table 12, Table 13 or Table 14.

[0027] In some embodiments, the method comprises: (a) inhibiting expression of one or more nuclear factors selected from the group consisting of CBFB, MYB, ZNF217, FOXK1, FLI1, FOS, SATB1, IL2, ATXN7L3, MTF1, RELA, IRF1, BCL11B, STAT3, MED30, MED14, MED11, IKZF3, KMT2A, IKZF1, MED12, TAF5L, PTEN, IRF4, FOXO1, FOXP1, CTLA4, ETS1, MYBL2, TP53, MBD2, ZBTB7A, DNMT1, HIVEP2, KLF2, TFDP1, SMARCB1, MAF, FOXP3, GATA3, STAT5B, STAT5A, PRDM1, TNFAIP3, RXRB, TFDP1, CXXC1, NFATC2, MAF, IRF2, ZBTB11, JAK3, YY1, IL2RA and GTF2B; and/or (b) overexpressing one or more nuclear factors selected from the group consisting of CBFB, MYB, ZNF217, FOXK1, FLI1, FOS, SATB1, IL2, ATXN7L3, MTF1, RELA, IRF1, BCL11B, STAT3, MED30, MED14, MED11, IKZF3, KMT2A, IKZF1, MED12, TAF5L, PTEN, IRF4, FOXO1, FOXP1, CTLA4, ETS1, MYBL2, TP53, MBD2, ZBTB7A, DNMT1, HIVEP2, KLF2, TFDP1, SMARCB1, MAF, FOXP3, GATA3, STAT5B, STAT5A, PRDM1, TNFAIP3, RXRB, TFDP1, CXXC1, NFATC2, MAF, IRF2, ZBTB11, JAK3, YY1, IL2RA and GTF2B.

[0028] In some embodiments, inhibiting expression of one or more nuclear factors comprises reducing expression of the nuclear factor, or reducing expression of a polynucleotide encoding the nuclear factor. In some embodiments, inhibiting comprises contacting a polynucleotide encoding the nuclear factor with a targeted nuclease, a guide RNA (gRNA), an siRNA, an antisense RNA, microRNA (miRNA), or short hairpin RNA (shRNA). In some embodiments, inhibiting comprises contacting the polynucleotide encoding the nuclear factor with at least one gRNA and optionally a targeted nuclease, wherein the at least one gRNA comprises a sequence selected from one or more of Tables 1-8. In some embodiments, inhibiting comprises mutating the polynucleotide encoding the nuclear factor. In some embodiments, inhibiting comprises contacting the polynucleotide encoding the nuclear factor with a targeted nuclease. In some embodiments, inhibiting comprises performing clustered regularly interspaced short palindromic repeats (CRISPR)/Cas genome editing.

[0029] In some embodiments, the targeted nuclease introduces a double-stranded break in a target region in the polynucleotide encoding the nuclear factor. In some embodiments, the targeted nuclease is an RNA-guided nuclease. In some embodiments, the RNA-guided nuclease is a Cpf1 nuclease or a Cas9 nuclease and the method further comprises introducing into a T cell a gRNA that specifically hybridizes to a target region in the polynucleotide. In some embodiments, the Cpf1 nuclease or the Cas9 nuclease and the gRNA are introduced into the T cell as a ribonucleoprotein (RNP) complex.

[0030] In some embodiments, the genetically modified T cell is administered to a human following inhibition of one or more nuclear factors or overexpression of one or more nuclear factors. In some embodiments, the T cell is obtained from a human prior to treating the T cell to inhibit expression of one or more nuclear factors and/or overexpress one or more nuclear factors, and the treated T cell is reintroduced into a human. In any of the methods provided herein, the T cell can be, for example a Treg cell, a CD8+ cell, CD4+ cell or a CD8+CD4+ cell. In another embodiment, provided herein is a T cell made by any of the methods described herein. Populations of T cells made by any of the methods described herein are also provided.

[0031] In some embodiments, expression of one or more nuclear factors set forth in Table Table 2, Table 4, Table 5, Table 7, Table 9, Table 11 or Table 13 is inhibited in the T cell obtained from the human. In some embodiments, expression of one or more nuclear factors set forth in Table 2, Table 4, Table 5, Table 7, Table 9, Table 11 or Table 13 is inhibited in the T cell obtained from a human that has cancer.

[0032] In some embodiments, expression of one or more nuclear factors selected from the group consisting of CBFB, MYB, ZNF217, FOXK1, FLI1, FOS, SATB1, IL2, and ATXN7L3 is inhibited in the T cell obtained from a human that has cancer.

[0033] In some embodiments, expression of one or more nuclear factors selected from the group consisting of ETS1, MYBL2, MYB, TP53, FLI1, SATB1, MBD2, ZBTB7A, DNMT1, TFDP1, SMARCB1 or MAF is inhibited in the T cell obtained from a human that has cancer.

[0034] In some embodiments, expression of one or more nuclear factors selected from the group consisting of NFATC2, MAF, ZBTB7A, MBD2, GATA3, MED14, IRF2, MED30, ZBTB11, RELA, JAK3, MED11, BCL11B, MTF1, ATXN7L3, YY1, ETS1, IL2, DNMT1, GTF2B and SMARCB1 is inhibited in the T cell obtained from a human that has cancer.

[0035] In some embodiments, expression of one or more nuclear factors selected from the group consisting of IKZF3, YY1, MBD2, IRF4, IKZF1, RXRB, RELA, ETS1, KMT2A, PTEN, JAK3, STAT5A, GATA3, FOXP1, STAT5B, and IL2RA is inhibited in the T cell obtained from a human that has cancer.

[0036] In some embodiments, expression of one or more nuclear factors set forth in Table 7, Table 9 or Table 13 is inhibited to increase IL2RA expression in a conventional T cell, wherein the subject has cancer.

[0037] In some embodiments, expression of one or more nuclear factors selected from the group consisting of MED12, CBFB, HIVEP2, KLF2, MYB, FOXK1, ZNF217, IRF2, TFNAIP3, MYC, PRDM1, TFDP1, IRF1, FOXO1, ATXN7L3 and TP53 is inhibited to increase IL2RA expression in a effector T cell, and wherein the subject has cancer.

[0038] In some embodiments, expression of one or more nuclear factors set forth in Table 8, Table 10 or Table 14 is inhibited to decrease IL2RA expression in a regulatory T cell, and wherein the subject has an autoimmune disorder.

[0039] In some embodiments, expression of one or more nuclear factors selected from the group consisting of IKZF3, YY1, MBD2, IRF4, IKZF1, RXRB, RELA, ETS1, KMT2A, PTEN, JAK3, STAT5A, GATA3, FOXP1, STAT5B, and IL2RA is inhibited to decrease IL2RA expression in a regulatory T cell, and wherein the subject has an autoimmune disorder.

[0040] In some embodiments, expression of one or more nuclear factors set forth in Table 8, Table 12 or Table 14 is inhibited to decrease IL2RA expression in a regulatory T cell, and wherein the subject has cancer. In some embodiments, expression of one or more nuclear factors selected from the group consisting of IKZF3, YY1, MBD2, IRF4, IKZF1, RXRB, RELA, ETS1, KMT2A, PTEN, JAK3, STAT5A, GATA3, FOXP1, STAT5B, and IL2RA is inhibited to decrease IL2RA expression in a regulatory T cell, and wherein the subject has cancer.

[0041] In some embodiments, expression of one or more nuclear factors set forth in Table 8, Table 10 or Table 14 is inhibited to decrease IL2RA expression in a conventional T cell, and wherein the subject has an autoimmune disorder. In some embodiments, expression of one or more nuclear factors selected from the group consisting of IKZF3, YY1, MBD2, IRF4, IKZF1, RXRB, RELA, ETS1, KMT2A, PTEN, JAK3, STAT5A, GATA3, FOXP1, STAT5B, and IL2RA is inhibited to decrease IL2RA expression in a conventional T cell, and wherein the subject has an autoimmune disorder.

[0042] In some methods, expression of one or more nuclear factors selected from the group consisting of MED12, CBFB, HIVEP2, KLF2, MYB, FOXK1, ZNF217, IRF2, TFNAIP3, MYC, PRDM1, TFDP1, IRF1, FOXO1, ATXN7L3 and TP53 is inhibited to increase IL2RA expression in a conventional T cell, wherein the subject has cancer. In some examples, one or more nuclear factors selected from the group consisting of MED12, FOXP1, PTEN, IKZF1, TAF5L, PRDM1, TFDP1, CXXC1, IKZF3 and TP53 is inhibited to increase IL-2 in a conventional T cell, wherein the subject has cancer.

[0043] In another embodiment, provided herein is a method of modifying T cells in a subject in need thereof, comprising inhibiting expression of a one or more nuclear factors set forth in Table 1, Table 2, Table 3, Table 4, Table 5, Table 6, Table 7, Table 8, Table 9, Table 10, Table 11, Table 12, Table 13 or Table 14 and/; or overexpressing one or more nuclear factors set for in Table 1, Table 2, Table 3, Table 4, Table 5, Table 6, Table 7, Table 8, Table 9, Table 10, Table 11, Table 12, Table 13 or Table 14 in the human T cells of the subject.

[0044] In some embodiments, one or more nuclear factors selected from the group consisting of CBFB, MYB, ZNF217, FOXK1, FLI1, FOS, SATB1, IL2, ATXN7L3, MTF1. RELA, IRF1, BCL11B, STAT3, MED30, MED14, MED11, IKZF3, KMT2A, IKZF1, MED12, TAF5L, PTEN, IRF4, FOXO1, FOXP1, CTLA4, ETS1, MYBL2, TP53, MBD2, ZBTB7A, DNMT1, HIVEP2, KLF2, TFDP1, SMARCB1, MAF, FOXP3, GATA3, STAT5B, STAT5A, PRDM1, TNFAIP3, RXRB, TFDP1, CXXC1, NFATC2, MAF, IRF2, ZBTB11, JAK3, YY1, IL2RA and GTF2B are inhibited in the human T cells of the subject.

[0045] In some embodiments, inhibiting expression of one or more nuclear factors or overexpression of one or more nuclear factors occurs in vivo.

[0046] In some embodiments, the method comprises a) obtaining T cells from the subject; b) modifying the T cells by inhibiting expression of one or more nuclear factors set forth in Table 2, Table 4, Table 5 or Table 7; and c) administering the T cells to the subject. In some embodiments, one or more nuclear factors selected from the group consisting of MTF1, RELA, IRF1, BCL11B, STAT3, MED30, MED14, MED11, IKZF3, KMT2A, IKZF1, TAF5L, IRF4, FOXP1, CTLA4, FOXP3, GATA3, STAT5B, STAT5A, PTEN, FOXO1, MED12, FOXP1, PTEN, IKZF1, TAF5L, PRDM1, TFDP1, CXXC1, IKZF3, TP53, CBFB, HIVEP2, KLF2, MYB, FOXK1, ZNF217, IRF2, TFNAIP3, MYC, PRDM1, TFDP1, IRF1, ATXN7L3 and TP53 are inhibited. In some embodiments the subject has cancer.

[0047] In some embodiments, the method comprises a) obtaining T cells from the subject; b) modifying the T cells by overexpressing one or more nuclear factors set forth in Table 1, Table 3, Table 6 or Table 8, and c) administering the T cells to the subject. In some embodiments, one or more nuclear factors selected from the group consisting of CBFB, MYB, ZNF217, FOXK1, FLI1, FOS, SATB1, IL2, ATXN7L3, ETS1, MYBL2, MYB, TP53, FLI1, SATB1, MBD2, ZBTB7A, DNMT1, TFDP1, SMARCB1, MAF, NFATC2, MAF, ZBTB7A, MBD2, GATA3, MED14, IRF2, MED30, ZBTB11, RELA, JAK3, MED11, BCL11B, MTF1, ATXN7L3, YY1, ETS1, IL2, DNMT1, GTF2B, SMARCB1, IKZF3, YY1, MBD2, IRF4, IKZF1, RXRB, RELA, ETS1, KMT2A, PTEN, JAK3, STAT5A, GATA3, FOXP1, STAT5B and IL2RA are overexpressed. In some embodiments the subject has cancer.

[0048] In some embodiments, the method comprises a) obtaining T cells from the subject; b) modifying the T cells by inhibiting expression of one or more nuclear factors set forth in Table 1, Table 3, Table 6 or Table 8; and c) administering the T cells to the subject. In some embodiments, expression of one or more nuclear factors selected from the group consisting of CBFB, MYB, ZNF217, FOXK1, FLI1, FOS, IL2, ATXN7L3, ETS1, MYBL2, MYB, TP53, FLI1, SATB1, ZBTB7A, DNMT1, TFDP1, SMARCB1, MAF, NFATC2, MAF, ZBTB7A, MED14, IRF2, MED30, ZBTB11, MED11, BCL11B, MTF1, ATXN7L3, YY1, ETS1, 1L2, DNMT1, GTF2B, IKZF3, MBD2, IRF4, IKZF1, RXRB, RELA, ETS1, KMT2A, PTEN, JAK3, STAT5A, GATA3, FOXP1, STAT5B and IL2RA is inhibited. In some embodiments, the subject has an autoimmune disorder.

[0049] In some embodiments, the method comprises a) obtaining T cells from the subject: b) modifying the T cells by overexpressing one or more nuclear factors set forth in Table 2, Table 4, Table 5 or Table 7; and c) administering the T cells to the subject. In some embodiments, one or more nuclear factors selected from the group consisting of MTF1, RELA, IRF1, BCL11B, STAT3, MED30, MED14, MED11, IKZF3, KMT2A, IKZF1, TAF5L, IRF4, FOXP1, CTLA4, FOXP3, GATA3, STAT5B, STAT5A, PTEN, FOXO1, MED12, FOXP1, PTEN, IKZF1, TAF5L, PRDM1, TFDP1, CXXC1, IKZF3, TP53, CBFB, HIVEP2, KLF2, MYB, FOXK1, ZNF217, IRF2, TFNAIP3, MYC, PRDM1, TFDP1, IRF1, ATXN7L3 and TP53 are overexpressed. In some embodiments, the subject has an autoimmune disorder.

[0050] Also provided is a method of treating an autoimmune disorder in a subject, the method comprising administering a population of the T cells to a subject that has an autoimmune disorder, wherein the T cells comprise a genetic modification or heterologous polynucleotide that inhibits expression of a nuclear factor set forth in Table 1 and/or a heterologous polypeptide that encodes a nuclear factor set forth in Table 2; a genetic modification or heterologous polynucleotide that inhibits expression of a nuclear factor set forth in Table 3 and/or a heterologous polypeptide that encodes a nuclear factor set forth in Table 4; a genetic modification or heterologous polynucleotide that inhibits expression of a nuclear factor set forth in Table 6, and/or a heterologous polypeptide that encodes a nuclear factor set forth in Table 5; or a genetic modification or heterologous polynucleotide that inhibits expression of a nuclear factor set forth in Table 8, and/or a heterologous polypeptide that encodes a nuclear factor set forth in Table 7.

[0051] Further provided is a method of treating cancer in a subject, the method comprising administering a population of the T cells to a subject that has cancer, wherein the T cells comprise a genetic modification or heterologous polynucleotide that inhibits expression of a nuclear factor set forth in Table 2, and/or a heterologous polypeptide that encodes a nuclear factor set forth in Table 1; a genetic modification or heterologous polynucleotide that inhibits expression of a nuclear factor set forth in Table 4, and/or a heterologous polypeptide that encodes a nuclear factor set forth in Table 3; a genetic modification or heterologous polynucleotide that inhibits expression of a nuclear factor set forth in Table 5, and/or a heterologous polypeptide that encodes a nuclear factor set forth in Table 6; a genetic modification or heterologous polynucleotide that inhibits expression of a nuclear factor set forth in Table 7, and/or a heterologous polypeptide that encodes a nuclear factor set forth in Table 8.

### BRIEF DESCRIPTION OF THE DRAWINGS

[0052] The present application includes the following figures. The figures are intended to illustrate certain embodiments and/or features of the compositions and methods, and to supplement any description(s) of the compositions and methods. The figures do not limit the scope of the compositions and methods, unless the written description expressly indicates that such is the case.

[0053] FIG. 1 is a diagram showing how SLICE (sgRNA Lentiviral Infection with Cas9 Electroporation), as described in Shifrut et al. Cell 175(7): 1958-1971 (2018), can be used to identify nuclear factors that modulate targets of interest. Flow-Seq enables CRISPR loss-of-function screening in primary human T cells. A transcription factor CRISPR knockout library was introduced into CD4+ T cells along with Cas9 protein. These cells were stained for a gene of interest, sorted into high- and low-expression bins using fluorescent activated cell sorting (FACS), and the guide RNAs in each bin were sequenced. The high- and low-enriched guide RNAs were compared to identify transcription factors that regulate the protein levels of the target of interest.

[0054] FIG. 2 provides an overview of the arrayed Cas9 ribonucleoprotein (RNP) approach to individually knock out transcription factor hits from SLICE Flow-Seq screens. Synthetic guide RNAs were ordered against 56 genes and 4 non-targeting controls, complexed with Cas9 protein, and electroporated into T cells in an arrayed format. Cells were collected 3, 5, and 7 days after electroporation for multiplex phenotyping including flow cytometry validation, genotyping, RNA-Seq, and ATAC-Seq.

[0055] FIGS. 3A-3D provide the transcription factors that regulate protein levels of four key immune genes IL2RA (FIG. 3A), IL-2 (FIG. 3B), CTLA4 (FIG. 3C) and FOXP3 (FIG. 3D) discovered using SLICE Flow-Seq. Cells were stained for the target of interest, sorted into high and low expression bins using fluorescent activated cell sorting, and the guide RNAs in each bin were sequenced. Red points highlight transcription factors that are significantly differently enriched between the high and low bins. Each dot represents the signal across four independent guide RNAs targeting that transcription factor.

[0056] FIGS. 4A-4C show there is a high degree of overlap between hits from the four screens. A) The total number of significant hits in each screen and the number of hits that overlap between the different screens. B) Prioritization of 56 genes for follow-up. Genes are grouped (1-4) based on the number of screens they were significant in. The effect sizes in each Flow-Seq screen are shown. C) Genotyping of the insertion/deletion frequency following RNP editing at each transcription factor target site using two different guide RNAs.

[0057] FIGS. 5A-5D show flow cytometry validation of screen hits following RNP knockout. Cells were stained for the target of interest (IL2RA (FIG. 5A), IL-2 (FIG. 5B), CRLA4 (FIG. 5C) and FOXP3 (FIG. 5D)) and analyzed using flow cytometry. Median fluorescent intensity was normalized to four non-targeting controls per donor. Points are colored based on two independent guide RNAs. Points show the median of 3 biological donors and error bars show the range.

[0058] FIG. 6 shows identification of cell type-specific transcription factors that regulate the protein levels of IL2RA discovered using SLICE Flow-Seq in effector T cells vs. regulatory T cells. Effector and regulatory T cells were stained for IL2RA, sorted into high and low expression bins using fluorescent activated cell sorting, and the guide RNAs in each bin were sequenced. Table 9 provides transcription factors that, when inhibited, result in increased levels of IL2RA in effector T cells. Table 10 provides transcription factors that, when inhibited, result in decreased levels of IL2RA in effector T cells. Table 11 provides transcription factors that, when inhibited, result in increased levels of IL2RA in regulatory T cells. Table 12 provides transcription factors that, when inhibited, result in decreased levels of IL2RA in regulatory T cells. Table 13 provides transcription factors that, when inhibited, result in increased levels of IL2RA in effector cells and regulatory T cells. Table 14 provides transcription factors that, when inhibited, result in decreased levels of IL2RA in effector cells and regulatory T cells.

[0059] FIG. 7 shows validation of hit screen. FIG. 7A is a schematic of synthetic crRNA/Cas9 ribonucleoprotein arrayed knockout (KO) followed by in depth characterization of KOs. FIG. 7B shows representative flow cytometry density plots for top hits in the IL2RA. IL-2, and CTLA4 screens. All plots are normalized to a maximum height of 1. KO of hits that decrease target levels are shown in orange and KO of hits that increase target levels are shown in blue. FIGS. 7C-F show flow cytometry results for IL2RA, IL-2, CTLA4 and FOXP3, 5 days after arrayed RNP KO. Screen hits analyzed are displayed on the Y axis ordered by their effect size in the pooled CRISPR screen. Changes in IL2RA, IL-2, and CTLA4 median fluorescence intensity relative to non-targeting controls is shown on the X-axis. Dots represent individual data points, bars depict average, and error bars depict standard deviation across 2 guide RNAs and 3 donors per guide RNA. Bars are colored by whether the flow cytometry effect matched the pooled CRISPR screen effect and whether the KO increased or decreased the level of IL2RA. IL-2, or CTLA4.

[0060] All of the hits in FIGS. 7C-F, above the Non-Targeting dashed line were concordant with pooled screens and increased expression of the target, except for SMARCB1 (for IL2RA), NFATC2 (for CTLA4), TFDP1 (for CTLA4), ZBTB11 (for CTLA4), MYC (for CTLA4), KLF2 (for CTLA4), TP53 (for CTLA4), TNFAIP3 (for CTLA4), and IKZF1 (for IL-2). All of the hits in FIGS. 7C-F, below the Non-Targeting dashed line were concordant with pooled screens and decreased expression of the target, except for IKZF1 (for IL2RA), STAT5B (for IL-2), JAK3 (for IL-2), MED14 (for FOXP3), MED30 (for FOXP3), CBFB (for FOXP3) and SETDB1 (for FOXP3). The average insertion/deletion (indel) percentage across multiple donors for guide RNA 1 (n=3) and guide RNA 2 (n=2) at the genomic target site is shown to the right of each graph.

### Definitions

[0061] As used in this specification and the appended claims, the singular forms “a,” “an,” and “the” include plural reference unless the context clearly dictates otherwise.

[0062] The term “nucleic acid” or “polynucleotide” refers to deoxyribonucleic acids (DNA) or ribonucleic acids (RNA) and polymers thereof in either single- or double-stranded form. Unless specifically limited, the term encompasses nucleic acids containing known analogues of natural nucleotides that have similar binding properties as the reference nucleic acid and are metabolized in a manner similar to naturally occurring nucleotides. Unless otherwise indicated, a particular nucleic acid sequence also implicitly encompasses conservatively modified variants thereof (e.g., degenerate codon substitutions), alleles, orthologs, SNPs, and complementary sequences as well as the sequence explicitly indicated. Specifically, degenerate codon substitutions may be achieved by generating sequences in which the third position of one or more selected (or all) codons is substituted with mixed-base and/or deoxyinosine residues (Batzer et al., Nucleic Acid Res. 19:5081 (1991); Ohtsuka et al., J. Biol. Chem. 260:2605-2608 (1985); and Rossolini et al., Mol. Cell. Probes 8:91-98 (1994)). The term nucleic acid is used interchangeably with gene, cDNA, and mRNA encoded by a gene.

[0063] The term “gene” can refer to the segment of DNA involved in producing or encoding a polypeptide chain. It may include regions preceding and following the coding region (leader and trailer) as well as intervening sequences (introns) between individual coding segments (exons).

[0064] “Polypeptide,” “peptide,” and “protein” are used interchangeably herein to refer to a polymer of amino acid residues. As used herein, the terms encompass amino acid chains of any length, including full-length proteins, wherein the amino acid residues are linked by covalent peptide bonds.

[0065] The term “inhibiting expression” refers to inhibiting or reducing the expression of a gene product, e.g., RNA or protein. As used throughout, the term “nuclear factor” refers to a protein that directly or indirectly alters expression of IL2RA, IL-2, CTLA4 or FOXP3, for example, a transcription factor. To inhibit or reduce the expression of a gene, the sequence and/or structure of the gene may be modified such that the gene would not be transcribed (for DNA) or translated (for RNA), or would not be transcribed or translated to produce a functional protein, for example, a polypeptide or protein encoded by a gene set forth in Table 1, Table 2, Table3, Table 4, Table 5, Table 6, Table 7, Table 8, Table 9, Table 10, Table 11, Table 12, Table 13 or Table 14. Various methods for inhibiting or reducing expression are described in detail further herein. Some methods may introduce nucleic acid substitutions, additions, and/or deletions into the wild-type gene. Some methods may also introduce single or double strand breaks into the gene. To inhibit or reduce the expression of a protein, one may inhibit or reduce the expression of the gene or polynucleotide encoding the protein. In other embodiments, one may target the protein directly to inhibit or reduce the protein's expression using, e.g., an antibody or a protease. “Inhibited” expression refers to a decrease by at least 10% as compared to a reference control level, for example a decrease by at least about 20%, or at least about 30%, or at least about 40%, or at least about 50%, or at least about 60%, or at least about 70%, or at least about 80%, or at least about 90% or up to and including a 100% decrease (i.e. absent level as compared to a reference sample). It is understood that one or more nuclear factors set forth in Table 1, Table 2, Table3, Table 4, Table 5, Table 6, Table 7, Table 8, Table 9, Table 10, Table 11, Table 12, Table 13 or Table 14 can be inhibited in a T cell. It is also understood that two or more nuclear factors inhibited in a T cell can be selected from one or more of Table 1, Table 2, Table3, Table 4, Table 5, Table 6, Table 7, Table 8, Table 9, Table 10, Table 11, Table 12, Table 13 or Table 14.

[0066] The term “overexpressing” or “overexpression” refers to increasing the expression of a gene or protein. “Overexpression” refers to an increase in expression, for example, in increase in the amount of mRNA or protein expressed in a T cell, of at least 10%, as compared to a reference control level, or an increase of least about 20%, or at least about 30%, or at least about 40%, or at least about 50%, or at least about 60%, or at least about 70%, or at least about 80%, or at least about 90%, or at least about 100%, or at least about 200%, or at least about 300% or at least about 400%. Various methods for overexpression are known to those of skill in the art, and include, but are not limited to, stably or transiently introducing a heterologous polynucleotide encoding a protein (i.e., a nuclear factor set forth in Table 1, Table 2, Table3, Table 4, Table 5, Table 6, Table 7, Table 8, Table 9, Table 10, Table 11, Table 12, Table 13 or Table 14) to be overexpressed into the cell or inducing overexpression of an endogenous gene encoding the protein in the cell. It is understood that one or more nuclear factors set forth in Table 1, Table 2, Table3, Table 4, Table 5. Table 6, Table 7, Table 8, Table 9, Table 10, Table 11, Table 12, Table 13 or Table 14 can be overexpressed in a T cell. It is also understood that two or more nuclear factors overexpressed in a T cell can be selected from one or more of Table 1. Table 2, Table3, Table 4, Table 5, Table 6, Table 7, Table 8, Table 9, Table 10, Table 11, Table 12, Table 13 or Table 14.

[0067] As used herein the phrase “heterologous” refers to what is not found in nature. The term “heterologous sequence” refers to a sequence not normally found in a given cell in nature. As such, a heterologous nucleotide or protein sequence may be: (a) foreign to its host cell (i.e., is exogenous to the cell); (b) naturally found in the host cell (i.e., endogenous) but present at an unnatural quantity in the cell (i.e., greater or lesser quantity than naturally found in the host cell); or (c) be naturally found in the host cell but positioned outside of its natural locus.

[0068] “Treating” refers to any indicia of success in the treatment or amelioration or prevention of the disease, condition, or disorder, including any objective or subjective parameter such as abatement; remission; diminishing of symptoms or making the disease condition more tolerable to the patient; slowing in the rate of degeneration or decline; or making the final point of degeneration less debilitating.

[0069] A “promoter” is defined as one or more a nucleic acid control sequences that direct transcription of a nucleic acid. As used herein, a promoter includes necessary nucleic acid sequences near the start site of transcription, such as, in the case of a polymerase II type promoter, a TATA element. A promoter also optionally includes distal enhancer or repressor elements, which can be located as much as several thousand base pairs from the start site of transcription.

[0070] As used herein, the term “complementary” or “complementarity” refers to specific base pairing between nucleotides or nucleic acids. Complementary nucleotides are, generally, A and T (or A and U), and G and C. The guide RNAs described herein can comprise sequences, for example, DNA targeting sequences that are perfectly complementary or substantially complementary (e.g., having 1-4 mismatches) to a genomic sequence.

[0071] As used throughout, by subject is meant an individual. For example, the subject is a mammal, such as a primate, and, more specifically, a human. Non-human primates are subjects as well. The term subject includes domesticated animals, such as cats, dogs, etc., livestock (for example, cattle, horses, pigs, sheep, goats, etc.) and laboratory animals (for example, ferret, chinchilla, mouse, rabbit, rat, gerbil, guinea pig, etc.). Thus, veterinary uses and medical uses and formulations are contemplated herein. The term does not denote a particular age or sex. Thus, adult and newborn subjects, whether male or female, are intended to be covered. As used herein, patient or subject may be used interchangeably and can refer to a subject afflicted with a disease or disorder.

[0072] As used throughout, the term “targeted nuclease” refers to nuclease that is targeted to a specific DNA sequence in the genome of a cell to produce a strand break at that specific DNA sequence. The strand break can be single-stranded or double-stranded. Targeted nucleases include, but are not limited to, a Cas nuclease, a TAL-effector nuclease and a zinc finger nuclease.

[0073] The “CRISPR/Cas” system refers to a widespread class of bacterial systems for defense against foreign nucleic acid. CRISPR/Cas systems are found in a wide range of eubacterial and archaeal organisms. CRISPR/Cas systems include type I, II, and III sub-types. Wild-type type 11 CRISPR/Cas systems utilize an RNA-mediated nuclease, for example, Cas9, in complex with guide and activating RNA to recognize and cleave foreign nucleic acid. Guide RNAs having the activity of both a guide RNA and an activating RNA are also known in the art. In some cases, such dual activity guide RNAs are referred to as a single guide RNA (sgRNA).

[0074] Cas9 homologs are found in a wide variety of eubacteria, including, but not limited to bacteria of the following taxonomic groups: Actinobacteria, Aquificae, Bacteroidetes-Chlorobi, Chlamydiae-Verrucomicrobia, Chiroflexi, Cyanobacteria, Firmicutes, Proteobacteria, Spirochaetes, and Thermotogae. An exemplary Cas9 protein is the Streptococcus pyogenes Cas9 protein. Additional Cas9 proteins and homologs thereof are described in, e.g., Chylinksi, et al., RNA Biol. 2013 May 1; 10(5): 726-737; Nat. Rev. Microbiol. 2011 June; 9(6): 467477; Hou, et al., Proc Nad/Acad Sci USA. 2013 Sep. 24:110(39):15644-9; Sampson et al., Nature. 2013 May 9; 497(7448):254-7; and Jinek, et al., Science. 2012 Aug. 17; 337(609%):816-21. Variants of any of the Cas9 nucleases provided herein can be optimized for efficient activity or enhanced stability in the host cell. Thus, engineered Cas9 nucleases are also contemplated.

[0075] As used throughout, a guide RNA (gRNA) sequence is a sequence that interacts with a site-specific or targeted nuclease and specifically binds to or hybridizes to a target nucleic acid within the genome of a cell, such that the gRNA and the targeted nuclease co-localize to the target nucleic acid in the genome of the cell. Each gRNA includes a DNA targeting sequence or protospacer sequence of about 10 to 50 nucleotides in length that specifically binds to or hybridizes to a target DNA sequence in the genome. For example, the targeting sequence may be about 10, 11, 12, 13, 14, 15, 16, 17, 18, 19, 20, 21, 22, 23, 24, 25, 26, 27, 28, 29, 30, 31, 32, 33, 34, 35, 36, 37, 38, 39, 40, 41, 42, 43, 44, 45, 46, 47, 48, 49, or 50 nucleotides in length. In some embodiments, the gRNA comprises a crRNA sequence and a transactivating crRNA (tracrRNA) sequence. In some embodiments, the gRNA does not comprise a tracrRNA sequence. Table 3 shows exemplary gRNA sequences used in methods of the disclosure.

[0076] As used herein, the term “Cas9” refers to an RNA-mediated nuclease (e.g. of bacterial or archaeal origin, or derived therefrom). Exemplary RNA-mediated nucleases include the foregoing Cas9 proteins and homologs thereof. Other RNA-mediated nucleases include Cpf1 (See, e.g., Zetsche et al., Cell, Volume 163, Issue 3, p759-771, 22 Oct. 2015) and homologs thereof. Similarly, as used herein, the term “Cas9 ribonucleoprotein” complex and the like refers to a complex between the Cas9 protein and a guide RNA, the Cas9 protein and a crRNA, the Cas9 protein and a trans-activating crRNA (tracrRNA), or a combination thereof (e.g., a complex containing the Cas9 protein, a tracrRNA, and a crRNA guide RNA). It is understood that in any of the embodiments described herein, a Cas9 nuclease can be substituted with a Cpf1 nuclease or any other guided nuclease.

[0077] As used herein, the phrase “modifying” refers to inducing a structural change in the sequence of the genome at a target genomic region in a T cell. For example, the modifying can take the form of inserting a nucleotide sequence into the genome of the cell. Such modifying can be performed, for example, by inducing a double stranded break within a target genomic region, or a pair of single stranded nicks on opposite strands and flanking the target genomic region. Methods for inducing single or double stranded breaks at or within a target genomic region include the use of a Cas9 nuclease domain, or a derivative thereof, and a guide RNA, or pair of guide RNAs, directed to the target genomic region. “Modifying” can also refer to altering the expression of a nuclear factor in a T cell, for example inhibiting expression of a nuclear factor or overexpressing a nuclear factor in a T cell.

[0078] As used herein, the phrase “T cell” refers to a lymphoid cell that expresses a T cell receptor molecule. T cells include human alpha beta (αβ) T cells and human gamma delta (γδ) T cells. T cells include, but are not limited to, naïve T cells, stimulated T cells, primary T cells (e.g., uncultured), cultured T cells, immortalized T cells, helper T cells, cytotoxic T cells, memory T cells, regulatory T cells, natural killer T cells, combinations thereof, or sub-populations thereof. T cells can be CD4⁺, CD8⁺, or CD4⁺ and CD8⁺. T cells can also be CD4⁻, CD8⁻, or CD4⁻ and CD8⁻ T cells can be helper cells, for example helper cells of type T_{H}1, T_{H}2, T_{H}3, T_{H}19, T_{H}17, or T_{FH}. T cells can be cytotoxic T cells. T cells can also be regulatory T cells. Regulatory T cells (Tregs) can be FOXP3⁺ or FOXP3⁻. T cells can be alpha/beta T cells or gamma/delta T cells. In some cases, the T cell is a CD4⁺CD25^{hi}CD127^{lo} regulatory T cell. In some cases, the T cell is a regulatory T cell selected from the group consisting of type 1 regulatory (Tr1), T_{H}3, CD8+CD28−, Treg17, and Qa-1 restricted T cells, or a combination or sub-population thereof. In some cases, the T cell is a FOXP3⁺ T cell. In some cases, the T cell is a CD4⁺CD25^{lo}CD127^{hi} effector T cell. In some cases, the T cell is a CD4⁺CD25^{lo}CD127^{hi}CD45RA^{hi}CD45RO⁻ naïve T cell. A T cell can be a recombinant T cell that has been genetically manipulated.

[0079] As used herein, the phrase “primary” in the context of a primary cell is a cell that has not been transformed or immortalized. Such primary cells can be cultured, sub-cultured, or passaged a limited number of times (e.g., cultured 0, 1, 2, 3, 4, 5, 6, 7, 8, 9, 10, 11, 12, 13, 14, 15, 16, 17, 18, 19, or 20 times). In some cases, the primary cells are adapted to in vitro culture conditions. In some cases, the primary cells are isolated from an organism, system, organ, or tissue, optionally sorted, and utilized directly without culturing or sub-culturing. In some cases, the primary cells are stimulated, activated, or differentiated. For example, primary T cells can be activated by contact with (e.g., culturing in the presence of) CD3, CD28 agonists, IL-2, IFN-γ, or a combination thereof.

[0080] As used herein, the phrase “introducing” in the context of introducing a nucleic acid or a complex comprising a nucleic acid, for example, an RNP complex, refers to the translocation of the nucleic acid sequence or the RNP complex from outside a cell to inside the cell. In some cases, introducing refers to translocation of the nucleic acid or the complex from outside the cell to inside the nucleus of the cell. Various methods of such translocation are contemplated, including but not limited to, electroporation, contact with nanowires or nanotubes, receptor mediated internalization, translocation via cell penetrating peptides, liposome mediated translocation, and the like.

### DETAILED DESCRIPTION OF THE INVENTION

[0081] The following description recites various aspects and embodiments of the present compositions and methods. No particular embodiment is intended to define the scope of the compositions and methods. Rather, the embodiments merely provide non-limiting examples of various compositions and methods that are at least included within the scope of the disclosed compositions and methods. The description is to be read from the perspective of one of ordinary skill in the art; therefore, information well known to the skilled artisan is not necessarily included

### I. Methods and Compositions

[0082] As described herein, the disclosure provides compositions and methods directed to modifying T cells by inhibiting the expression of one or more nuclear factors and/or overexpressing one or more nuclear factors in a T cell. The disclosure also features compositions comprising the genetically modified T cells described herein. A population of modified T cells may provide therapeutic benefits in treating diseases with altered immune responses, for example, cancer or treating autoimmune diseases.

[0083] The inventors have discovered that by inhibiting the expression of one or more nuclear factors and/or overexpressing one or more nuclear factors, T cells may be altered to modulate T cell function.

[0084] Examples of nuclear factors whose expression may be altered to modify the stability of T cells in the methods described herein include, but are not limited to the nuclear factors set forth in Table 1, Table 2, Table3, Table 4, Table 5, Table 6, Table 7, Table 8, Table 9, Table 10, Table 11, Table 12, Table 13 or Table 14.

[0085] In some embodiments, the present invention provides a method of modifying a T cells, the method comprising: inhibiting expression of one or more nuclear factors set forth in Table 1, Table 2, Table3, Table 4, Table 5, Table 6, Table 7, Table 8, Table 9, Table 10, Table 11, Table 12, Table 13 or Table 14, and/or overexpressing one or more nuclear factors set forth in Table 1, Table 2, Table3, Table 4, Table 5, Table 6, Table 7, Table 8, Table 9, Table 10, Table 11, Table 12, Table 13 or Table 14.

[0086] In some embodiments, the T cell comprises a genetic modification or heterologous polynucleotide that inhibits expression of one or more nuclear factors selected from the group consisting of CBFB, MYB, ZNF217, FOXK1, FLI1, FOS, SATB1, IL2, ATXN7L3, MTF1, RELA, IRF1, BCL11B, STAT3, MED30, MED14, MED11, IKZF3, KMT2A, IKZF1, MED12, TAF5L, PTEN, IRF4, FOXO1, FOXP1, CTLA4, ETS1, MYBL2, TP53, MBD2, ZBTB7A, DNMT1, HIVEP2, KLF2, TFDP1, SMARCB1, MAF, FOXP3, GATA3, STAT5B, STAT5A, PRDM1, TNFAIP3, RXRB, TFDP1, CXXC1, NFATC2, MAF, IRF2, ZBTB11, JAK3, YY1, IL2RA and GTF2B.

[0087] In some embodiments one or more nuclear factors selected from the group consisting of CBFB, MYB, ZNF217, FOXK1, FLI1, FOS, SATB1, IL2, ATXN7L3, MTF1, RELA, IRF1, BCL11B, STAT3, MED30, MED14, MED11, IKZF3, KMT2A, IKZF1, MED12, TAF5L, PTEN, IRF4, FOXO1, FOXP1, CTLA4, ETS1, MYBL2, TP53, MBD2, ZBTB7A, DNMT1, TFDP1, SMARCB1, MAF, FOXP3, GATA3, STAT5B, STAT5A, PRDM1, TNFAIP3, RXRB, TFDP1, CXXC1, NFATC2, MAF, IRF2, ZBTB11, JAK3, YY1, IL2RA and GTF2B are overexpressed in the T cell. In some embodiments a one or more nuclear factors are inhibited in the T cell and one or more, different nuclear factors are overepxressed in the T cell.

TABLE 1
Nuclear factors that can be inhibited to increase CTLA4 expression or overexpressed to decrease CTLA4 expression

| | | | | | | Position | | | | | | | | |
|---|---|---|---|---|---|---|---|---|---|---|---|---|---|---|
| | | screen_ | Target | | | of Base | | | SEQ | Target | SEQ | | | Rule |
| gene_ | screen_ | di- | Gene | Target | Genomic | After Cut | | sgRNA Target | ID | Context | ID | PAM | Exon | Set 2 |
| id | target | rection | ID | Transcript | Sequence | (1-based) | Strand | Sequence | NO: | Sequence | NO: | Sequence | Number | score |
| MAX | CTLA4 | CTLA4 | 4149 | NM_ | NC_ | 65077986 | sense | AATATATCCAGTA | 1. | ACAGAATA | 145. | AGG | 4 | 0.6132 |
| | | high | | 002382.4 | 000014.9 | | | TATGCGA | | TATCCAGT | | | | |
| | | | | | | | | | | ATATGCGA | | | | |
| | | | | | | | | | | AGGAAA | | | | |
| MAX | CTLA4 | CTLA4 | 4149 | NM_ | NC_ | 65077942 | anti- | GAAGAGCATTCTG | 2. | TCCAGAAG | 146. | AGG | 4 | 0.5652 |
| | | high | | 002382.4 | 000014.9 | | sense | CCGCTTG | | AGCATTCT | | | | |
| | | | | | | | | | | GCCGCTTG | | | | |
| | | | | | | | | | | AGGTCG | | | | |
| MAX | CTLA4 | CTLA4 | 4149 | NM_ | NC_ | 65101564 | sense | TATTCCAGGAAGA | 3. | CTCTTATT | 147. | AGG | 2 | 0.668 |
| | | high | | 002382.4 | 000014.9 | | | GCAACCG | | CCAGGAA | | | | |
| | | | | | | | | | | GAGCAAC | | | | |
| | | | | | | | | | | CGAGGTTT | | | | |
| MAX | CTLA4 | CTLA4 | 4149 | NM_ | NC_ | 65076652 | sense | TTTAGTCCGTGCA | 4. | GCCTTTTA | 148. | AGG | 5 | 0.5205 |
| | | high | | 002382.4 | 000014.9 | | | CTGGAGA | | GTCCGTGC | | | | |
| | | | | | | | | | | ACTGGAG | | | | |
| | | | | | | | | | | AAGGCGA | | | | |
| ARID3B | CTLA4 | CTLA4 | 10620 | NM_ | NC_ | 74591240 | sense | AATTGATGGCAAC | 5. | CAGCAATT | 149. | AGG | 6 | 0.6479 |
| | | high | | 006465.2 | 000015.10 | | | CGCAGGG | | GATGGCA | | | | |
| | | | | | | | | | | ACCGCAG | | | | |
| | | | | | | | | | | GGAGGGC | | | | |
| | | | | | | | | | | C | | | | |
| ARID3B | CTLA4 | CTLA4 | 10620 | NM_ | NC_ | 74544090 | anti- | GCTGTGGCGGAA | 6. | CCCAGCTG | 150. | CGG | 2 | 0.6132 |
| | | high | | 006465.2 | 000015.10 | | sense | AGGAGAGT | | TGGCGGA | | | | |
| | | | | | | | | | | AAGGAGA | | | | |
| | | | | | | | | | | GTCGGCTG | | | | |
| ARID3B | CTLA4 | CTLA4 | 10620 | NM_ | NC_ | 74544185 | sense | GTGGCCCAAGTGT | 7. | AGCAGTG | 151. | GGG | 2 | 0.6876 |
| | | high | | 006465.2 | 000015.10 | | | TTGAACG | | GCCCAAGT | | | | |
| | | | | | | | | | | GTTTGAAC | | | | |
| | | | | | | | | | | GGGGCAA | | | | |
| ARID3B | CTLA4 | CTLA4 | 10620 | NM_ | NC_ | 74573200 | sense | TTCGTCTTTATGC | 8. | CCTCTTCG | 152. | GGG | 4 | 0.6704 |
| | | high | | 006465.2 | 000015.10 | | | AGAAGAG | | TCTTTATG | | | | |
| | | | | | | | | | | CAGAAGA | | | | |
| | | | | | | | | | | GGGGTGA | | | | |
| ZNF652 | CTLA4 | CTLA4 | 22834 | NM_ | NC_ | 49317162 | sense | AGAAAGTCAGCG | 9. | GTAGAGA | 153. | AGG | 2 | 0.6318 |
| | | high | | 014897.2 | 000017.11 | | | TTACACAA | | AAGTCAGC | | | | |
| | | | | | | | | | | GTTACACA | | | | |
| | | | | | | | | | | AAGGAGA | | | | |
| ZNF652 | CTLA4 | CTLA4 | 22834 | NM_ | NC_ | 49316958 | sense | CCAGGGTATTTAA | 10. | TGCCCCAG | 154. | TGG | 2 | 0.621 |
| | | high | | 014897.2 | 000017.11 | | | CACTCGC | | GGTATTTA | | | | |
| | | | | | | | | | | ACACTCGC | | | | |
| | | | | | | | | | | TGGTAC | | | | |
| ZNF652 | CTLA4 | CTLA4 | 22834 | NM_ | NC_ | 49312707 | sense | GGCTCATGTGCG | 11. | CCATGGCT | 155. | TGG | 3 | 0.674 |
| | | high | | 014897.2 | 000017.11 | | | GAAACACA | | CATGTGCG | | | | |
| | | | | | | | | | | GAAACAC | | | | |
| | | | | | | | | | | ATGGTTG | | | | |
| ZNF652 | CTLA4 | CTLA4 | 22834 | NM_ | NC_ | 49317275 | sense | TGTTCTTAAGACA | 12. | CTCCTGTT | 156. | AGG | 2 | 0.7322 |
| | | high | | 014897.2 | 000017.11 | | | AGCAGTG | | CTTAAGAC | | | | |
| | | | | | | | | | | AAGCAGT | | | | |
| | | | | | | | | | | GAGGAGG | | | | |
| KLF2 | CTLA4 | CTLA4 | 10365 | NM_ | NC_ | 16325729 | anti- | AAACCAGGGCCA | 13. | GCCGAAA | 157. | CGG | 2 | 0.5997 |
| | | high | | 016270.2 | 000019.10 | | sense | CCGAAAGG | | CCAGGGC | | | | |
| | | | | | | | | | | CACCGAAA | | | | |
| | | | | | | | | | | GGCGGCG | | | | |
| | | | | | | | | | | G | | | | |
| KLF2 | CTLA4 | CTLA4 | 10365 | NM_ | NC_ | 16325576 | anti- | CCCTCGCGCTTGA | 14. | GGCGCCCT | 158. | CGG | 2 | 0.5868 |
| | | high | | 016270.2 | 000019.10 | | sense | GGCCGCG | | CGCGCTTG | | | | |
| | | | | | | | | | | AGGCCGC | | | | |
| | | | | | | | | | | GCGGTCC | | | | |
| KLF2 | CTLA4 | CTLA4 | 10365 | NM_ | NC_ | 16325811 | sense | CTTCGGTCTCTTC | 15. | CAGCCTTC | 159. | CGG | 2 | 0.7252 |
| | | high | | 016270.2 | 000019.10 | | | GACGACG | | GGTCTCTT | | | | |
| | | | | | | | | | | CGACGAC | | | | |
| | | | | | | | | | | GCGGCCG | | | | |
| KLF2 | CTLA4 | CTLA4 | 10365 | NM_ | NC_ | 16325354 | anti- | TCGGGGTAATAG | 16. | GGGTTCG | 160. | CGG | 2 | 0.6967 |
| | | high | | 016270.2 | 000019.10 | | sense | AACGCAGG | | GGGTAAT | | | | |
| | | | | | | | | | | AGAACGC | | | | |
| | | | | | | | | | | AGGCGGC | | | | |
| | | | | | | | | | | GG | | | | |
| ZBTB11 | CTLA4 | CTLA4 | 27107 | NM_ | NC_ | 1.02E+08 | anti- | AATAAGATGTGCT | 17. | GACGAAT | 161. | AGG | 6 | 0.6273 |
| | | high | | 014415.3 | 000003.12 | | sense | CGCAAAG | | AAGATGT | | | | |
| | | | | | | | | | | GCTCGCAA | | | | |
| | | | | | | | | | | AGAGGCA | | | | |
| | | | | | | | | | | C | | | | |
| ZBTB11 | CTLA4 | CTLA4 | 27107 | NM_ | NC_ | 1.02E+08 | sense | CAGGACTTACGA | 18. | CACCCAGG | 162. | TGG | 4 | 0.605 |
| | | high | | 014415.3 | 000003.12 | | | GTACAGAA | | ACTTACGA | | | | |
| | | | | | | | | | | GTACAGA | | | | |
| | | | | | | | | | | ATGGAGG | | | | |
| ZBTB11 | CTLA4 | CTLA4 | 27107 | NM_ | NC_ | 1.02E+08 | sense | GGCATATATTCGA | 19. | AAGGGGC | 163. | AGG | 4 | 0.5992 |
| | | high | | 014415.3 | 000003.12 | | | CTACACA | | ATATATTC | | | | |
| | | | | | | | | | | GACTACAC | | | | |
| | | | | | | | | | | AAGGGAA | | | | |
| ZBTB11 | CTLA4 | CTLA4 | 27107 | NM_ | NC_ | 1.02E+08 | anti- | TATACATCCTACT | 20. | CAGCTATA | 164. | GGG | 4 | 0.6653 |
| | | high | | 014415.3 | 000003.12 | | sense | GATGACA | | CATCCTAC | | | | |
| | | | | | | | | | | TGATGACA | | | | |
| | | | | | | | | | | GGGCAG | | | | |
| TNFAIP3 | CTLA4 | CTLA4 | 7128 | NM_ | NC_ | 1.38E+08 | sense | CCACTTGTTAACA | 21. | TGTTCCAC | 165. | GGG | 6 | 0.6901 |
| | | high | | 001270507. | 000006.12 | | | GAGACCG | | TTGTTAAC | | | | |
| | | | | 1 | | | | | | AGAGACC | | | | |
| | | | | | | | | | | GGGGAAG | | | | |
| TNFAIP3 | CTLA4 | CTLA4 | 7128 | NM_ | NC_ | 1.38E+08 | sense | CTTGTGGCGCTGA | 22. | GAAGCTTG | 166. | CGG | 2 | 0.6709 |
| | | high | | 001270507. | 000006.12 | | | AAACGAA | | TGGCGCTG | | | | |
| | | | | 1 | | | | | | AAAACGA | | | | |
| | | | | | | | | | | ACGGTAA | | | | |
| TNFAIP3 | CTLA4 | CTLA4 | 7128 | NM_ | NC_ | 1.38E+08 | sense | TATGCCATGAGTG | 23. | CCTTTATG | 167. | AGG | 7 | 0.7533 |
| | | high | | 001270507. | 000006.12 | | | CTCAGAG | | CCATGAGT | | | | |
| | | | | 1 | | | | | | GCTCAGA | | | | |
| | | | | | | | | | | GAGGCGG | | | | |
| TNFAIP3 | CTLA4 | CTLA4 | 7128 | NM_ | NC_ | 1.38E+08 | anti- | TGAGAGACTCCA | 24. | GATTTGAG | 168. | CGG | 3 | 0.6393 |
| | | high | | 001270507. | 000006.12 | | sense | GTTGCCAG | | AGACTCCA | | | | |
| | | | | 1 | | | | | | GTTGCCAG | | | | |
| | | | | | | | | | | CGGAAT | | | | |
| MEF2D | CTLA4 | CTLA4 | 4209 | NM_ | NC_ | 1.56E+08 | sense | CAAGTACCGACGC | 25. | AGGACAA | 169. | AGG | 4 | 0.651 |
| | | high | | 005920.3 | 000001.11 | | | GCCAGCG | | GTACCGAC | | | | |
| | | | | | | | | | | GCGCCAG | | | | |
| | | | | | | | | | | CGAGGAG | | | | |
| | | | | | | | | | | C | | | | |
| MEF2D | CTLA4 | CTLA4 | 4209 | NM_ | NC_ | 1.56E+08 | sense | CATCATCCCTCAC | 26. | GTGACATC | 170. | CGG | 5 | 0.6308 |
| | | high | | 005920.3 | 000001.11 | | | GGACCCG | | ATCCCTCA | | | | |
| | | | | | | | | | | CGGACCC | | | | |
| | | | | | | | | | | GCGGCTC | | | | |
| MEF2D | CTLA4 | CTLA4 | 4209 | NM_ | NC_ | 1.56E+08 | anti- | GATGACTGCACTC | 27. | GAAGGAT | 171. | GGG | 6 | 0.6972 |
| | | high | | 005920.3 | 000001.11 | | sense | ACCAACA | | GACTGCAC | | | | |
| | | | | | | | | | | TCACCAAC | | | | |
| | | | | | | | | | | AGGGCTG | | | | |
| MEF2D | CTLA4 | CTLA4 | 4209 | NM_ | NC_ | 1.56E+08 | anti- | GGTGAGCGAATG | 28. | GGGTGGT | 172. | GGG | 9 | 0.6131 |
| | | high | | 005920.3 | 000001.11 | | sense | AGTAGACT | | GAGCGAA | | | | |
| | | | | | | | | | | TGAGTAG | | | | |
| | | | | | | | | | | ACTGGGA | | | | |
| | | | | | | | | | | GA | | | | |
| UBP1 | CTLA4 | CTLA4 | 7342 | NM_ | NC_ | 33425595 | sense | ACGCTTACTTATTT | 29. | TGAAACGC | 173. | AGG | 3 | 0.6109 |
| | | high | | 001128161. | 000003.12 | | | GAACCA | | TTACTTAT | | | | |
| | | | | 1 | | | | | | TTGAACCA | | | | |
| | | | | | | | | | | AGGTTA | | | | |
| UBP1 | CTLA4 | CTLA4 | 7342 | NM_ | NC_ | 33411659 | sense | CTGTGGGAATAAT | 30. | ATGTCTGT | 174. | AGG | 6 | 0.6499 |
| | | high | | 001128161. | 000003.12 | | | TGACACA | | GGGAATA | | | | |
| | | | | 1 | | | | | | ATTGACAC | | | | |
| | | | | | | | | | | AAGGACG | | | | |
| UBP1 | CTLA4 | CTLA4 | 7342 | NM_ | NC_ | 33408700 | sense | GGTGATTCTCTGG | 31. | CTACGGTG | 175. | AGG | 9 | 0.6695 |
| | | high | | 001128161. | 000003.12 | | | CAAAGCG | | ATTCTCTG | | | | |
| | | | | 1 | | | | | | GCAAAGC | | | | |
| | | | | | | | | | | GAGGCAG | | | | |
| UBP1 | CTLA4 | CTLA4 | 7342 | NM_ | NC_ | 33409564 | sense | TTTACTCCACGGA | 32. | AGAATTTA | 176. | AGG | 7 | 0.7811 |
| | | high | | 001128161. | 000003.12 | | | AGCACGG | | CTCCACGG | | | | |
| | | | | 1 | | | | | | AAGCACG | | | | |
| | | | | | | | | | | GAGGTGA | | | | |
| MYC | CTLA4 | CTLA4 | 4609 | NM_ | NC_ | 1.28E+08 | sense | AGAGTGCATCGA | 33. | CCTCAGAG | 177. | TGG | 2 | 0.6543 |
| | | high | | 002467.4 | 000008.11 | | | CCCCTCGG | | TGCATCGA | | | | |
| | | | | | | | | | | CCCCTCGG | | | | |
| | | | | | | | | | | TGGTCT | | | | |
| MYC | CTLA4 | CTLA4 | 4609 | NM_ | NC_ | 1.28E+08 | anti- | CTGCGGGGAGGÅ | 34. | TGCCCTGC | 178. | AGG | 2 | 0.6832 |
| | | high | | 002467.4 | 000008.11 | | sense | CTCCGTCG | | GGGGAGG | | | | |
| | | | | | | | | | | ACTCCGTC | | | | |
| | | | | | | | | | | GAGGAGA | | | | |
| MYC | CTLA4 | CTLA4 | 4609 | NM_ | NC_. | 1.28E+08 | sense | CTTCGGGGAGAC | 35. | CTCCCTTC | 179. | CGG | 2 | 0.6919 |
| | | high | | 002467.4 | 00000811 | | | AACGACGG | | GGGGAGA | | | | |
| | | | | | | | | | | CAACGAC | | | | |
| | | | | | | | | | | GGCGGTG | | | | |
| | | | | | | | | | | G | | | | |
| MYC | CTLA4 | CTLA4 | 4609 | NM_ | NC_ | 1.28E+08 | anti- | GCTGCACCGAGTC | 36. | TACGGCTG | 180. | AGG | 2 | 0.6842 |
| | | high | | 002467.4 | 000008.11 | | sense | GTAGTCG | | CACCGAGT | | | | |
| | | | | | | | | | | CGTAGTCG | | | | |
| | | | | | | | | | | AGGTCA | | | | |
| NR2C2 | CTLA4 | CTLA4 | 7182 | NM_ | NC_ | 15030406 | sense | CCAGTOGACACCC | 37. | GAGACCA | 181. | AGG | 10 | 0.6976 |
| | | high | | 003298.4 | 000003.12 | | | ATCATTG | | GTCGACAC | | | | |
| | | | | | | | | | | CCATCATT | | | | |
| | | | | | | | | | | GAGGTTG | | | | |
| NR2C2 | CTLA4 | CTLA4 | 7182 | NM_ | NC_ | 15016174 | anti- | CCCCAGTAAACGC | 38. | TCTTCCCC | 182. | AGG | 5 | 0.7308 |
| | | high | | 003298.4 | 000003.12 | | sense | TCCACAG | | AGTAAAC | | | | |
| | | | | | | | | | | GCTCCACA | | | | |
| | | | | | | | | | | GAGGCAG | | | | |
| NR2C2 | CTLA4 | CTLA4 | 7182 | NM_ | NC_ | 15024201 | anti- | GAACGTCACCTTA | 39. | TAGAGAA | 183. | TGG | 8 | 0.6168 |
| | | high | | 003298.4 | 000003.12 | | sense | GAATCCG | | CGTCACCT | | | | |
| | | | | | | | | | | TAGAATCC | | | | |
| | | | | | | | | | | GTGGCCA | | | | |
| NR2C2 | CTLA4 | CTLA4 | 7182 | NM_ | NC_ | 15023322 | anti- | TCTTTGTCTGCCA | 40. | TCCATCTT | 184. | GGG | 7 | 0.6618 |
| | | high | | 003298.4 | 000003.12 | | sense | CAAACGT | | TGTCTGCC | | | | |
| | | | | | | | | | | ACAAACGT | | | | |
| | | | | | | | | | | GGGAGT | | | | |
| HINFP | CTLA4 | CTLA4 | 25988 | NM_ | NC_ | 1.19E+08 | sense | CACACCAAGCTGA | 41. | CTACCACA | 185. | GGG | 4 | 0.6982 |
| | | high | | 015517.4 | 000011.10 | | | AACAGTG | | CCAAGCTG | | | | |
| | | | | | | | | | | AAACAGT | | | | |
| | | | | | | | | | | GGGGGCT | | | | |
| HINFP | CTLA4 | CTLA4 | 25988 | NM_ | NC_ | 1.19E+08 | sense | CATGCGCTTTCGT | 42. | ACCACATG | 186. | AGG | 8 | 0.7351 |
| | | high | | 015517.4 | 000011.10 | | | CACAGTG | | CGCTTTCG | | | | |
| | | | | | | | | | | TCACAGTG | | | | |
| | | | | | | | | | | AGGACC | | | | |
| HINFP | CTLA4 | CTLA4 | 25988 | NM_ | NC_ | 1.19E+08 | anti- | GGTGCTCTCGAAG | 43. | CGGAGGT | 187. | CGG | 6 | 0.7508 |
| | | high | | 015517.4 | 000011.10 | | sense | TTTACTG | | GCTCTCGA | | | | |
| | | | | | | | | | | AGTTTACT | | | | |
| | | | | | | | | | | GCGGTCC | | | | |
| HINFP | CTLA4 | CTLA4 | 25988 | NM_ | NC_ | 1.19E+08 | anti- | TGACTACTTACGA | 44 | CCTCTGAC | 188. | AGG | 6 | 0.7145 |
| | | high | | 015517.4 | 000011.10 | | sense | TCCAATG | | TACTTACG | | | | |
| | | | | | | | | | | ATCCAATG | | | | |
| | | | | | | | | | | AGGTCT | | | | |
| ZNF235 | CTLA4 | CTLA4 | 9310 | NM_ | NC_ | 44298866 | sense | ATATGATATCCCA | 45. | CCAGATAT | 189. | AGG | 4 | 0.6116 |
| | | high | | 004234.4 | 000019.10 | | | GTTGGAG | | GATATCCC | | | | |
| | | | | | | | | | | AGTTGGA | | | | |
| | | | | | | | | | | GAGGGAA | | | | |
| ZNF235 | CTLA4 | CTLA4 | 9310 | NM_ | NC_ | 44288951 | sense | CTGTCTAGTGAAT | 46. | ACAACTGT | 190. | GGG | 5 | 0.7225 |
| | | high | | 004234.4 | 000019.10 | | | CACATAG | | CTAGTGAA | | | | |
| | | | | | | | | | | TCACATAG | | | | |
| | | | | | | | | | | GGGATC | | | | |
| ZNF235 | CTLA4 | CTLA4 | 9310 | NM_ | NC_ | 44288764 | anti- | GCACTATATTATC | 47. | TTGTGCAC | 191. | TGG | 5 | 0.7311 |
| | | high | | 004234.4 | 000019.10 | | sense | ATCATGG | | TATATTAT | | | | |
| | | | | | | | | | | CATCATGG | | | | |
| | | | | | | | | | | TGGTGT | | | | |
| ZNF235 | CTLA4 | CTLA4 | 9310 | NM_ | NC_ | 44288559 | anti- | TTCTCATGTGTAC | 48. | GTCCTTCT | 192. | TGG | 5 | 0.6489 |
| | | high | | 004234.4 | 000019.10 | | sense | TACACGC | | CATGTGTA | | | | |
| | | | | | | | | | | CTACACGC | | | | |
| | | | | | | | | | | TGGAGA | | | | |
| NFIL3 | CTLA4 | CTLA4 | 4783 | NM_ | NC_ | 91410555 | sense | ACAAATCTTCTGC | 49 | AAGAACA | 193. | AGG | 2 | 0.6396 |
| | | high | | 001289999. | 000009.12 | | | ATGTCGG | | AATCTTCT | | | | |
| | | | | 1 | | | | | | GCATGTCG | | | | |
| | | | | | | | | | | GAGGAAA | | | | |
| NFIL3 | CTLA4 | CTLA4 | 4783 | NM_ | NC_ | 91410227 | anti- | ACAACTACTTGAC | 50. | AAATACAA | 194. | AGG | 2 | 0.7129 |
| | | high | | 001289999. | 000009.12 | | sense | ACCATCG | | CTACTTGA | | | | |
| | | | | 1 | | | | | | CACCATCG | | | | |
| | | | | | | | | | | AGGGTT | | | | |
| NFIL3 | CTLA4 | CTLA4 | 4783 | NM_ | NC_ | 91410443 | sense | GAAGCGTCGACT | 51. | GTGAGAA | 195. | TGG | 2 | 0.6849 |
| | | high | | 001289999. | 000009.12 | | | GAATGACC | | GCGTCGAC | | | | |
| | | | | 1 | | | | | | TGAATGAC | | | | |
| | | | | | | | | | | CTGGTTT | | | | |
| NFIL3 | CTLA4 | CTLA4 | 4783 | NM_ | NC_ | 91410050 | sense | GGAATTAGAGAG | 52. | CGATGGA | 196. | GGG | 2 | 0.7312 |
| | | high | | 001289999. | 000009.12 | | | CTACACAA | | ATTAGAGA | | | | |
| | | | | 1 | | | | | | GCTACACA | | | | |
| | | | | | | | | | | AGGGAGC | | | | |
| IL2 | CTLA4 | CTLA4 | 3558 | NM_ | NC_ | 1.22E+08 | anti- | AAACTTAAATGTG | 53. | TGTAAAAC | 197. | TGG | 2 | 0.6039 |
| | | high | | 000586.3 | 000004.12 | | sense | AGCATCC | | TTAAATGT | | | | |
| | | | | | | | | | | GAGCATCC | | | | |
| | | | | | | | | | | TGGTGA | | | | |
| IL2 | CTLA4 | CTLA4 | 3558 | NM_ | NC_ | 1.22E+08 | sense | ACAACTGGAGCAT | 54. | AGCTACAA | 198. | TGG | 1 | 0.531 |
| | | high | | 000586.3 | 000004.12 | | | TTACTGC | | CTGGAGC | | | | |
| | | | | | | | | | | ATTTACTG | | | | |
| | | | | | | | | | | CTGGATT | | | | |
| IL2 | CTLA4 | CTLA4 | 3558 | NM_ | NC_ | 1.22E+08 | sense | AGAAGAAGAACT | 55. | GTCTAGAA | 199. | TGG | 3 | 0.4893 |
| | | high | | 000586.3 | 000004.12 | | | CAAACCTC | | GAAGAAC | | | | |
| | | | | | | | | | | TCAAACCT | | | | |
| | | | | | | | | | | CTGGAGG | | | | |
| IL2 | CTLA4 | CTLA4 | 3558 | NM_ | NC_ | 1.22E+08 | anti- | TTCTTTGTAGAAC | 56. | TGTTTTCTT | 200. | AGG | 1 | 0.5452 |
| | | high | | 000586.3 | 000004.12 | | sense | TTGAAGT | | TGTAGAAC | | | | |
| | | | | | | | | | | TTGAAGTA | | | | |
| | | | | | | | | | | GGTGC | | | | |
| VEZF1 | CTLA4 | CTLA4 | 7716 | NM_ | NC_ | 57980604 | sense | AACAAGGCATCA | 57. | TGTAAACA | 201. | AGG | 4 | 0.5923 |
| | | high | | 007146.2 | 000017.11 | | | GTAAAAGT | | AGGCATCA | | | | |
| | | | | | | | | | | GTAAAAGT | | | | |
| | | | | | | | | | | AGGTGG | | | | |
| VEZF1 | CTLA4 | CTLA4 | 7716 | NM_ | NC_ | 57982767 | sense | ACCGGATGACTTA | 58. | AAGGACC | 202. | AGG | 2 | 0.6541 |
| | | high | | 007146.2 | 000017.11 | | | CCATGTG | | GGATGACT | | | | |
| | | | | | | | | | | TACCATGT | | | | |
| | | | | | | | | | | GAGGTCT | | | | |
| VEZF1 | CTLA4 | CTLA4 | 7716 | NM_ | NC_ | 57983069 | sense | CCTTATCTCTACCA | 59 | TTCCCCTT | 203. | GGG | 2 | 0.6992 |
| | | high | | 007146.2 | 000017.11 | | | TCGCTG | | ATCTCTAC | | | | |
| | | | | | | | | | | CATCGCTG | | | | |
| | | | | | | | | | | GGGACA | | | | |
| VEZF1 | CTLA4 | CTLA4 | 7716 | NM_ | NC_ | 57980754 | sense | TTGCCACCAAAGA | 60. | GCCTTTGC | 204. | CGG | 4 | 0.692 |
| | | high | | 007146.2 | 000017.11 | | | CAGACTG | | CACCAAAG | | | | |
| | | | | | | | | | | ACAGACTG | | | | |
| | | | | | | | | | | CGGACA | | | | |
| ATXN7L3 | CTLA4 | CTLA4 | 56970 | NM_ | NC_ | 44197610 | sense | CACGGACCCTGAT | 61. | ACGACAC | 205. | LAGG | 2 | 0.6328 |
| | | high | | 001098833. | 000017.11 | | | AGCATGA | | GGACCCTG | | | | |
| | | | | 1 | | | | | | ATAGCATG | | | | |
| | | | | | | | | | | AAGGATT | | | | |
| ATXN7L3 | CTLA4 | CTLA4 | 56970 | NM_ | NC_ | 44197712 | sense | CATCGCTCAGGAG | 62. | AGGCCATC | 206. | CGG | 2 | 0.7491 |
| | | high | | 001098833. | 000017.11 | | | ATATACG | | GCTCAGG | | | | |
| | | | | 1 | | | | | | AGATATAC | | | | |
| | | | | | | | | | | GCGGACC | | | | |
| ATXN7L3 | CTLA4 | CTLA4 | 56970 | NM_ | NC_ | 44197233 | sense | GCAGCCGAATCG | 63. | AACAGCA | 207. | CGG | 3 | 0.6135 |
| | | high | | 001098833. | 000017.11 | | | CCAACCGC | | GCCGAATC | | | | |
| | | | | 1 | | | | | | GCCAACCG | | | | |
| | | | | | | | | | | CCGGTGA | | | | |
| ATXN7L3 | CTLA4 | CTLA4 | 56970 | NM_ | NC_ | 44195424 | sense | GCTTCGCAGCCTG | 64. | AGGAGCTT | 208. | CGG | 8 | 0.6566 |
| | | high | | 001098833. | 000017.11 | | | CTAACCA | | CGCAGCCT | | | | |
| | | | | 1 | | | | | | GCTAACCA | | | | |
| | | | | | | | | | | CGGTGA | | | | |
| TFDP1 | CTLA4 | CTLA4 | 7027 | NM_ | NC_ | 1.14E+08 | sense | ACCGGCAGCGTC | 65. | AGAGACC | 209. | TGG | 5 | 0.6315 |
| | | high | | 007111.4 | 000013.11 | | | AAACACCC | | GGCAGCG | | | | |
| | | | | | | | | | | TCAAACAC | | | | |
| | | | | | | | | | | CCTGGTGG | | | | |
| TFDP1 | CTLA4 | CTLA4 | 7027 | NM_ | NC_ | 1.14E+08 | sense | ATGACCAGAAAA | 66. | GCTTATGA | 210. | CGG | 7 | 0.6204 |
| | | high | | 007111.4 | 000013.11 | | | ACATAAGA | | CCAGAAA | | | | |
| | | | | | | | | | | AACATAAG | | | | |
| | | | | | | | | | | ACGGCGC | | | | |
| TFDP1 | CTLA4 | CTLA4 | 7027 | NM_ | NC_ | 1.14E+08 | anti- | CCTTCATGGAGAA | 67. | CAGACCTT | 211. | AGG | 6 | 0.6851 |
| | | high | | 007111.4 | 000013.11 | | sense | ATGCCGT | | CATGGAG | | | | |
| | | | | | | | | | | AAATGCCG | | | | |
| | | | | | | | | | | TAGGCCC | | | | |
| TFDP1 | CTLA4 | CTLA4 | 7027 | NM_ | NC_ | 1.14E+08 | sense | GGTGCAGAGAAA | 68. | ACCTGGTG | 212. | CGG | 9 | 0.6402 |
| | | high | | 007111.4 | 000013.11 | | | CCGGCATG | | CAGAGAA | | | | |
| | | | | | | | | | | ACCGGCAT | | | | |
| | | | | | | | | | | GCGGAGC | | | | |
| NSD1 | CTLA4 | CTLA4 | 64324 | NM_ | NC_ | 1.77E+08 | sense | AAGCACATAAAG | 69. | TTTGAAGC | 213. | AGG | 5 | 0.7285 |
| | | high | | 022455.4 | 000005.10 | | | ATGAACGG | | ACATAAAG | | | | |
| | | | | | | | | | | ATGAACG | | | | |
| | | | | | | | | | | GAGGGGA | | | | |
| NSD1 | CTLA4 | CTLA4 | 64324 | NM_ | NC_ | 1.77E+08 | sense | GAATTGCTAGTTA | 70. | TGAGGAA | 214. | AGG | 7 | 0.6674 |
| | | high | | 022455.4 | 000005.10 | | | AAACGCC | | TTGCTAGT | | | | |
| | | | | | | | | | | TAAAACGC | | | | |
| | | | | | | | | | | CAGGTAA | | | | |
| NSD1 | CTLA4 | CTLA4 | 64324 | NM_ | NC_ | 1.77E+08 | sense | GCCCTATCGGCAG | 71. | GGAGGCC | 215. | TGG | 4 | 0.6824 |
| | | high | | 022455.4 | 000005.10 | | | TACTACG | | CTATCGGC | | | | |
| | | | | | | | | | | AGTACTAC | | | | |
| | | | | | | | | | | GTGGAGG | | | | |
| NSD1 | CTLA4 | CTLA4 | 64324 | NM_ | NC_ | 1.77E+08 | sense | TATGCATGATAGT | 72. | AAGATATG | 216. | AGG | 5 | 0.6849 |
| | | high | | 022455.4 | 000005.10 | | | AAGACGA | | CATGATAG | | | | |
| | | | | | | | | | | TAAGACG | | | | |
| | | | | | | | | | | AAGGAGC | | | | |
| VPS52 | CTLA4 | CTLA4 | 6293 | NM_ | NC_ | 33267957 | sense | CAATGAACGAGC | 73. | TGGGCAAT | 217. | AGG | 8 | 0.6103 |
| | | high | | 001289174. | 000006.12 | | | AACAGCAA | | GAACGAG | | | | |
| | | | | 1 | | | | | | CAACAGCA | | | | |
| | | | | | | | | | | AAGGAGA | | | | |
| VPS52 | CTLA4 | CTLA4 | 6293 | NM_ | NC_ | 33266567 | sense | CCGTACACTCAGC | 74. | TGGGCCGT | 218. | TGG | 11 | 0.6309 |
| | | high | | 001289174. | 000006.12 | | | ATGACCC | | ACACTCAG | | | | |
| | | | | 1 | | | | | | CATGACCC | | | | |
| | | | | | | | | | | TGGTAA | | | | |
| VPS52 | CTLA4 | CTLA4 | 6293 | NM_ | NC_ | 33269070 | sense | GAAATCGCCAGG | 75. | CTTCGAAA | 219. | GGG | 5 | 0.7039 |
| | | high | | 001289174. | 000006.12 | | | CAGTTCGG | | TCGCCAGG | | | | |
| | | | | 1 | | | | | | CAGTTCGG | | | | |
| | | | | | | | | | | GGGAAA | | | | |
| VPS52 | CTLA4 | CTLA4 | 6293 | NM_ | NC_ | 33264461 | anti- | TCCAGGATCAGTT | 76. | CATCTCCA | 220. | TGG | 13 | 0.6852 |
| | | high | | 001289174. | 000006.12 | | sense | CAAACCG | | GGATCAGT | | | | |
| | | | | 1 | | | | | | TCAAACCG | | | | |
| | | | | | | | | | | TGGCCA | | | | |
| TP53 | CTLA4 | CTLA4 | 7157 | NM_ | NC_ | 7676227 | anti- | CCATTGTTCAATA | 77. | TGAACCAT | 221. | GGG | 4 | 0.6899 |
| | | high | | 000546.5 | 000017.11 | | sense | TCGTCCG | | TGTTCAAT | | | | |
| | | | | | | | | | | ATCGTCCG | | | | |
| | | | | | | | | | | GGGACA | | | | |
| TP53 | CTLA4 | CTLA4 | 7157 | NM_ | NC_ | 7675058 | sense | GAGCGCTGCTCA | 78. | CCATGAGC | 222. | TGG | 5 | 0.6542 |
| | | high | | 000546.5 | 000017.11 | | | GATAGCGA | | GCTGCTCA | | | | |
| | | | | | | | | | | GATAGCG | | | | |
| | | | | | | | | | | ATGGTGA | | | | |
| TP53 | CTLA4 | CTLA4 | 7157 | NM_ | NC_ | 7676527 | anti- | GATCCACTCACAG | 79. | AATGGATC | 223. | AGG | 2 | 0.6108 |
| | | high | | 000546.5 | 000017.11 | | sense | TTTCCAT | | CACTCACA | | | | |
| | | | | | | | | | | GTTTCCAT | | | | |
| | | | | | | | | | | AGGTCT | | | | |
| TP53 | CTLA4 | CTLA4 | 7157 | NM_ | NC_ | 7674864 | sense | GGTGCCCTATGAG | 80. | TGGTGGT | 224. | AGG | 6 | 0.6259 |
| | | high | | 000546.5 | 000017.11 | | | CCGCCTG | | GCCCTATG | | | | |
| | | | | | | | | | | AGCCGCCT | | | | |
| | | | | | | | | | | GAGGTCT | | | | |
| TGIF1 | CTLA4 | CTLA4 | 7050 | NM_ | NC_ | 3457612 | anti- | ACGAGCCAAAACT | 81. | ATGGACG | 225. | GGG | 4 | 0.6815 |
| | | high | | 001278684. | 000018.10 | | sense | GATCCCG | | AGCCAAA | | | | |
| | | | | 1 | | | | | | ACTGATCC | | | | |
| | | | | | | | | | | CGGGGAT | | | | |
| | | | | | | | | | | G | | | | |
| TGIF1 | CTLA4 | CTLA4 | 7050 | NM_ | NC_ | 3456514 | anti- | CTGAAGGATAGG | 82. | TGCTCTGA | 226. | CGG | 3 | 0.6508 |
| | | high | | 001278684. | 000018.10 | | sense | CATTGTAA | | AGGATAG | | | | |
| | | | | 1 | | | | | | GCATTGTA | | | | |
| | | | | | | | | | | ACGGTGC | | | | |
| TGIF1 | CTLA4 | CTLA4 | 7050 | NM_ | NC_ | 3457459 | sense | GTTCACAATTTCC | 83. | ATCAGTTC | 227. | GGG | 4 | 0.6788 |
| | | high | | 001278684. | 000018.10 | | | CGCCGTG | | ACAATTTC | | | | |
| | | | | 1 | | | | | | CCGCCGTG | | | | |
| | | | | | | | | | | GGGCCA | | | | |
| TGIF1 | CTLA4 | CTLA4 | 7050 | NM_ | NC_ | 3456466 | anti- | TCTGCACAGACTC | 84. | AGAATCTG | 228. | AGG | 3 | 0.6745 |
| | | high | | 001278684. | 000018.10 | | sense | CTTGGGT | | CACAGACT | | | | |
| | | | | 1 | | | | | | CCTTGGGT | | | | |
| | | | | | | | | | | AGGTTG | | | | |
| ZBTB7B | CTLA4 | CTLA4 | 51043 | NM_ | NC_ | 1.55E+08 | sense | AGCAAACCACCTA | 85. | CCAGAGC | 229. | AGG | 2 | 0.6906 |
| | | high | | 001256455. | 000001.11 | | | GTCCCTG | | AAACCACC | | | | |
| | | | | 1 | | | | | | TAGTCCCT | | | | |
| | | | | | | | | | | GAGGTGC | | | | |
| ZBTB7B | CTLA4 | CTLA4 | 51043 | NM_ | NC_ | 1.55E+08 | sense | CAGAGCTACGAAC | 86. | TCCCCAGA | 230. | GGG | 2 | 0.6187 |
| | | high | | 001256455. | 000001.11 | | | CCTATGA | | GCTACGAA | | | | |
| | | | | 1 | | | | | | CCCTATGA | | | | |
| | | | | | | | | | | GGGTGA | | | | |
| ZBTB7B | CTLA4 | CTLA4 | 51043 | NM_ | NC_ | 1.55E+08 | anti- | TCCGGATGGTGA | 87. | TGCGTCCG | 231. | AGG | 2 | 0.6762 |
| | | high | | 001256455. | 000001.11 | | sense | GGTCACAT | | GATGGTG | | | | |
| | | | | 1 | | | | | | AGGTCACA | | | | |
| | | | | | | | | | | TAGGTGG | | | | |
| ZBTB7B | CTLA4 | CTLA4 | 51043 | NM_ | NC_ | 1.55E+08 | anti- | TGTATAGGCAAAT | 88. | TGGCTGTA | 232. | GGG | 2 | 0.6181 |
| | | high | | 001256455. | 000001.11 | | sense | TCAAGGA | | TAGGCAA | | | | |
| | | | | 1 | | | | | | ATTCAAGG | | | | |
| | | | | | | | | | | AGGGCGC | | | | |
| USF2 | CTLA4 | CTLA4 | 7392 | NM_ | NC_ | 35270541 | anti- | AGCCGTAGTATCT | 89. | ACACAGCC | 233. | TGG | 5 | 0.6444 |
| | | high | | 003367.2 | 000019.10 | | sense | CCCACAC | | GTAGTATC | | | | |
| | | | | | | | | | | TOCCACAC | | | | |
| | | | | | | | | | | TGGACG | | | | |
| USF2 | CTLA4 | CTLA4 | 7392 | NM_ | NC_ | 35269463 | sense | CCACGACAAGGG | 90. | GCAGCCAC | 234. | CGG | 2 | 0.6052 |
| | | high | | 003367.2 | 000019.10 | | | ACCCGAGG | | GACAAGG | | | | |
| | | | | | | | | | | GACCCGA | | | | |
| | | | | | | | | | | GGCGGAG | | | | |
| | | | | | | | | | | G | | | | |
| USF2 | CTLA4 | CTLA4 | 7392 | NM_ | NC_ | 35270800 | anti- | CCTGCACATACGG | 91. | GTCCCCTG | 235. | GGG | 6 | 0.6405 |
| | | high | | 003367.2 | 000019.10 | | sense | AGAGTAA | | CACATACG | | | | |
| | | | | | | | | | | GAGAGTA | | | | |
| | | | | | | | | | | AGGGTGT | | | | |
| USF2 | CTLA4 | CTLA4 | 7392 | NM_ | NC_ | 35269690 | sense | TTCCGCACAGAGA | 92. | CCAGTTCC | 236. | AGG | 3 | 0.6997 |
| | | high | | 003367.2 | 1000019.0 | | | CAAATGG | | GCACAGA | | | | |
| | | | | | | | | | | GACAAAT | | | | |
| | | | | | | | | | | GGAGGAC | | | | |
| | | | | | | | | | | A | | | | |
| TBX21 | CTLA4 | CTLA4 | 30009 | NM_ | NC_ | 47744217 | anti- | CCGGGGCTGGTA | 93. | GCAGCCG | 237. | GGG | 4 | 0.6246 |
| | | high | | 013351.1 | 000017.11 | | sense | CTTATGGA | | GGGCTGG | | | | |
| | | | | | | | | | | TACTTATG | | | | |
| | | | | | | | | | | GAGGGAC | | | | |
| | | | | | | | | | | T | | | | |
| TBX21 | CTLA4 | CTLA4 | 30009 | NM_ | NC_ | 47733630 | sense | CCTGGGGTCTCCC | 94. | GCAGCCTG | 238. | GGG | 1 | 0.6294 |
| | | high | | 013351.1 | 000017.11 | | | TACCCGG | | GGGTCTCC | | | | |
| | | | | | | | | | | CTACCCGG | | | | |
| | | | | | | | | | | GGGGCG | | | | |
| TBX21 | CTLA4 | CTLA4 | 30009 | NM_ | NC_ | 47742726 | sense | GCGGTACCAGAG | 95. | ACTGGCG | 239. | GGG | 2 | 0.6321 |
| | | high | | 013351.1 | 000017.11 | | | CGGCAAGT | | GTACCAGA | | | | |
| | | | | | | | | | | GCGGCAA | | | | |
| | | | | | | | | | | GTGGGTG | | | | |
| | | | | | | | | | | C | | | | |
| TBX21 | CTLA4 | CTLA4 | 30009 | NM_ | NC_ | 47733889 | anti- | TAAACTTGGACCA | 96. | TGATTAAA | 240. | TGG | 1 | 0.6344 |
| | | high | | 013351.1 | 000017.11 | | sense | CAACAGG | | CTTGGACC | | | | |
| | | | | | | | | | | ACAACAG | | | | |
| | | | | | | | | | | GTGGTTG | | | | |
| JUN | CTLA4 | CTLA4 | 3725 | NM_ | NC_ | 58782886 | anti- | GCCCCACGTCGG | 97. | AGCAGCCC | 241. | AGG | 1 | 0.56 |
| | | high | | 002228.3 | 000001.11 | | sense | GCGAGGTG | | CACGTCGG | | | | |
| | | | | | | | | | | GCGAGGT | | | | |
| | | | | | | | | | | GAGGAGG | | | | |
| JUN | CTLA4 | CTLA4 | 3725 | NM_ | NC_ | 58783019 | anti- | GCTCTCGGACGG | 98. | GTCCGCTC | 242. | AGG | 1 | 0.6332 |
| | | high | | 002228.3 | 000001.11 | | sense | GAGGAACG | | TCGGACG | | | | |
| | | | | | | | | | | GGAGGAA | | | | |
| | | | | | | | | | | CGAGGCG | | | | |
| | | | | | | | | | | T | | | | |
| JUN | CTLA4 | CTLA4 | 3725 | NM_ | NC_ | 58782659 | sense | GGCGGCGCAGCC | 99. | CGTCGGC | 243. | GGG | 1 | 0.7008 |
| | | high | | 002228.3 | 000001.11 | | | GGTCAACG | | GGCGCAG | | | | |
| | | | | | | | | | | CCGGTCAA | | | | |
| | | | | | | | | | | CGGGGCA | | | | |
| | | | | | | | | | | G | | | | |
| JUN | CTLA4 | CTLA4 | 3725 | NM_ | NC_ | 58782936 | sense | TGAACCTGGCCGA | 100. | ACCCTGAA | 244. | GGG | 1 | 0.6651 |
| | | high | | 002228.3 | 000001.11 | | | CCCAGTG | | CCTGGCCG | | | | |
| | | | | | | | | | | ACCCAGTG | | | | |
| | | | | | | | | | | GGGAGC | | | | |
| EGR2 | CTLA4 | CTLA4 | 1959 | NM_ | NC_ | 62815887 | anti- | CTCCGTTCATCTG | 101. | GCCACTCC | 245. | GGG | 1 | 0.6291 |
| | | high | | 000399.3 | 000010.11 | | sense | GTCAAAG | | GTTCATCT | | | | |
| | | | | | | | | | | GGTCAAA | | | | |
| | | | | | | | | | | GGGGCCT | | | | |
| EGR2 | CTLA4 | CTLA4 | 1959 | NM_ | NC_ | 62815873 | sense | CTTTGACCAGATG | 102. | GCCCCTTT | 246. | TGG | 1 | 0.7256 |
| | | high | | 000399.3 | 000010.11 | | | AACGGAG | | GACCAGAT | | | | |
| | | | | | | | | | | GAACGGA | | | | |
| | | | | | | | | | | GTGGCCG | | | | |
| EGR2 | CTLA4 | CTLA4 | 1959 | NM_ | NC_ | 62815927 | anti- | GGGAAAGATGGT | 103. | CATTGGGA | 247. | TGG | 1 | 0.6771 |
| | | high | | 000399.3 | 000010.11 | | sense | CACCGACG | | AAGATGG | | | | |
| | | | | | | | | | | TCACCGAC | | | | |
| | | | | | | | | | | GTGGCGG | | | | |
| EGR2 | CTLA4 | CTLA4 | 1959 | NM_ | NC_ | 62815951 | sense | GTCTGACAACATC | 104. | AGCTGTCT | 248. | TGG | 1 | 0.6887 |
| | | high | | 000399.3 | 000010.11 | | | TACCCGG | | GACAACAT | | | | |
| | | | | | | | | | | CTACCCGG | | | | |
| | | | | | | | | | | TGGAGG | | | | |
| NFATC2 | CTLA4 | CTLA4 | 4773 | NM_ | NC_ | 51474071 | sense | ACATTGGAAGAA | 105. | ACGGACAT | 249. | CGG | 5 | 0.7428 |
| | | high | | 001258297. | 000020.11 | | | AGAACACG | | TGGAAGA | | | | |
| | | | | 1 | | | | | | AAGAACA | | | | |
| | | | | | | | | | | CGCGGGT | | | | |
| | | | | | | | | | | G | | | | |
| NFATC2 | CTLA4 | CTLA4 | 4773 | NM_ | NC_ | 51454601 | anti- | ATGTAAAGTTCTG | 106. | TCGGATGT | 250. | AGG | 6 | 0.7057 |
| | | high | | 001258297. | 000020.11 | | sense | CCCCGTG | | AAAGTTCT | | | | |
| | | | | 1 | | | | | | GCCCCGTG | | | | |
| | | | | | | | | | | AGGATC | | | | |
| NFATC2 | CTLA4 | CTLA4 | 4773 | NM_ | NC_ | 51523157 | sense | GCAGGGCGAGAG | 107. | GCGAGCA | 251. | CGG | 2 | 0.6354 |
| | | high | | 001258297. | 000020.11 | | | GAGAAACT | | GGGCGAG | | | | |
| | | | | 1 | | | | | | AGGAGAA | | | | |
| | | | | | | | | | | ACTCGGCT | | | | |
| | | | | | | | | | | C | | | | |
| NFATC2 | CTLA4 | CTLA4 | 4773 | NM_ | NC_ | 51523397 | sense | GCCGCAGCCCTCA | 108. | CCTCGCCG | 252. | TGG | 2 | 0.6587 |
| | | high | | 001258297. | 000020.11 | | | TCTCACG | | CAGCCCTC | | | | |
| | | | | 1 | | | | | | ATCTCACG | | | | |
| | | | | | | | | | | TGGCAC | | | | |
| RUNX3 | CTLA4 | CTLA4 | 864 | NM_ | NC_ | 24927597 | anti- | CACTGCGGCCCAC | 109. | CGCCCACT | 253. | AGG | 2 | 0.6012 |
| | | high | | 004350.2 | 000001.11 | | sense | GAAGCGA | | GCGGCCC | | | | |
| | | | | | | | | | | ACGAAGC | | | | |
| | | | | | | | | | | GAAGGTC | | | | |
| | | | | | | | | | | G | | | | |
| RUNX3 | CTLA4 | CTLA4 | 864 | NM_ | NC_ | 24902559 | sense | CCCCAGGATGCAT | 110. | CAGACCCC | 254. | GGG | 5 | 0.642 |
| | | high | | 004350.2 | 000001.11 | | | TATCCCG | | AGGATGC | | | | |
| | | | | | | | | | | ATTATCCC | | | | |
| | | | | | | | | | | GGGGCCA | | | | |
| RUNX3 | CTLA4 | CTLA4 | 864 | NM_ | NC_ | 24907265 | anti- | CCGTGCCGTACCT | 111. | CCCTCCGT | 255. | GGG | 4 | 0.6118 |
| | | high | | 004350.2 | 000001.11 | | sense | TGGATTG | | GCCGTACC | | | | |
| | | | | | | | | | | TTGGÅTTG | | | | |
| | | | | | | | | | | GGGTCT | | | | |
| RUNX3 | CTLA4 | CTLA4 | 864 | NM_ | NC_ | 24919297 | anti- | TCGGTGGTAGGTC | 112. | TGGCTCGG | 256. | GGG | 3 | 0.5939 |
| | | high | | 004350.2 | 000001.11 | | sense | GCCACTT | | TGGTAGGT | | | | |
| | | | | | | | | | | CGCCACTT | | | | |
| | | | | | | | | | | GGGTGG | | | | |
| SATB1 | CTLA4 | CTLA4 | 6304 | NM_ | NC_ | 18415117 | anti- | ATGCTAAGTACCT | 113. | TTCTATGC | 257. | GGG | 5 | 0.6378 |
| | | high | | 002971.4 | 000003.12 | | sense | GTGAAAG | | TAAGTACC | | | | |
| | | | | | | | | | | TGTGAAA | | | | |
| | | | | | | | | | | GGGGGCA | | | | |
| SATB1 | CTLA4 | CTLA4 | 6304 | NM_ | NC_ | 18417016 | sense | CATTGAATATGAT | 114 | ACGCCATT | 258. | AGG | 3 | 0.7747 |
| | | high | | 002971.4 | 000003.12 | | | TGCAAGG | | GAATATGA | | | | |
| | | | | | | | | | | TTGCAAGG | | | | |
| | | | | | | | | | | AGGAGC | | | | |
| SATB1 | CTLA4 | CTLA4 | 6304 | NM_ | NC_ | 18394751 | anti- | TAGGTGTTGATAC | 115. | CTGATAGG | 259. | GGG | 7 | 0.6656 |
| | | high | | 002971.4 | 000003.12 | | sense | GAGCCCA | | TGTTGATA | | | | |
| | | | | | | | | | | CGAGCCCA | | | | |
| | | | | | | | | | | GGGTGC | | | | |
| SATB1 | CTLA4 | CTLA4 | 6304 | NM_ | NC_ | 18394610 | anti- | TATTCATAGATCT | 116. | GGCTTATT | 260. | GGG | 7 | 0.6676 |
| | | high | | 002971.4 | 000003.12 | | sense | ACTGACA | | CATAGATC | | | | |
| | | | | | | | | | | TACTGACA | | | | |
| | | | | | | | | | | GGGGGA | | | | |
| FOS | CTLA4 | CTLA4 | 2353 | NM_ | NC_ | 75280663 | sense | GCTGACTGATACA | 117. | GGGAGCT | 261. | CGG | 3 | 0.7252 |
| | | high | | 005252.3 | 000014.9 | | | CTCCAAG | | GACTGATA | | | | |
| | | | | | | | | | | CACTCCAA | | | | |
| | | | | | | | | | | GCGGTAG | | | | |
| FOS | CTLA4 | CTLA4 | 2353 | NM_ | NC_ | 75280868 | sense | GGAAAAACTAGA | 118. | AGAAGGA | 262. | TGG | 4 | 0.6049 |
| | | high | | 005252.3 | 000014.9 | | | GTTCATCC | | AAAACTAG | | | | |
| | | | | | | | | | | AGTTCATC | | | | |
| | | | | | | | | | | CTGGCAG | | | | |
| FOS | CTLA4 | CTLA4 | 2353 | NM_ | NC_ | 75279056 | anti- | GTAGTAAGAGAG | 119. | AGTGGTA | 263. | CGG | 1 | 0.6017 |
| | | high | | 005252.3 | 000014.9 | | sense | GCTATCCC | | GTAAGAG | | | | |
| | | | | | | | | | | AGGCTATC | | | | |
| | | | | | | | | | | CCCGGCCG | | | | |
| FOS | CTLA4 | CTLA4 | 2353 | NM_ | NC_ | 75279925 | anti- | GTCGAGATGGCA | 120. | ACTGGTCG | 264. | GGG | 2 | 0.6244 |
| | | high | | 005252.3 | 000014.9 | | sense | GTGACCGT | | AGATGGC | | | | |
| | | | | | | | | | | AGTGACC | | | | |
| | | | | | | | | | | GTGGGAA | | | | |
| | | | | | | | | | | T | | | | |
| ZNF217 | CTLA4 | CTLA4 | 7764 | NM_ | NC_ | 53581993 | sense | CAAAATCTCACCC | 121. | AGACCAA | 265. | GGG | 1 | 0.6608 |
| | | high | | 006526.2 | 000020.11 | | | TGAAACG | | AATCTCAC | | | | |
| | | | | | | | | | | CCTGAAAC | | | | |
| | | | | | | | | | | GGGGAAG | | | | |
| ZNF217 | CTLA4 | CTLA4 | 7764 | NM_ | NC_ | 53581749 | sense | CCACGGCGAAGC | 122. | ACTCCCAC | 266. | TGG | 1 | 0.6177 |
| | | high | | 006526.2 | 000020.11 | | | GCCCTCCG | | GGCGAAG | | | | |
| | | | | | | | | | | CGCCCTCC | | | | |
| | | | | | | | | | | GTGGACG | | | | |
| ZNF217 | CTLA4 | CTLA4 | 7764 | NM_ | NC_ | 53582284 | sense | GGACACATAATG | 123. | ATGCGGA | 267. | GGG | 1 | 0.7154 |
| | | high | | 006526.2 | 000020.11 | | | GCAAATCG | | CACATAAT | | | | |
| | | | | | | | | | | GGCAAATC | | | | |
| | | | | | | | | | | GGGGGCC | | | | |
| ZNF217 | CTLA4 | CTLA4 | 7764 | NM_ | NC_ | 53576811 | anti- | TGGGTGGTACTGC | 124. | GTTATGGG | 268. | AGG | 3 | 0.6707 |
| | | high | | 006526.2 | 000020.11 | | sense | CATCCGG | | TGGTACTG | | | | |
| | | | | | | | | | | CCATCCGG | | | | |
| | | | | | | | | | | AGGAGG | | | | |
| FOXK1 | CTLA4 | CTLA4 | 221937 | NM_ | NC_ | 4757132 | sense | AACAGGCATTOCG | 125. | GTGGAAC | 269. | AGG | 5 | 0.6681 |
| | | high | | 001037165. | 000007.14 | | | GAAACGG | | AGGCATTC | | | | |
| | | | | 1 | | | | | | CGGAAAC | | | | |
| | | | | | | | | | | GGAGGCA | | | | |
| | | | | | | | | | | G | | | | |
| FOXK1 | CTLA4 | CTLA4 | 221937 | NM_ | NC_ | 4754516 | anti- | AGGTCACGTTCTG | 126. | TCCGAGGT | 270. | CGG | 3 | 0.734 |
| | | high | | 001037165. | 000007.14 | | sense | CACAAAG | | CACGTTCT | | | | |
| | | | | 1 | | | | | | GCACAAA | | | | |
| | | | | | | | | | | GCGGTAA | | | | |
| FOXK1 | CTLA4 | CTLA4 | 221937 | NM_ | NC_ | 4759162 | anti- | CTAACTTGGACCC | 127. | GAAGCTA | 271. | GGG | 6 | 0.6672 |
| | | high | | 001037165. | 000007.14 | | sense | AAACTCA | | ACTTGGAC | | | | |
| | | | | 1 | | | | | | CCAAACTC | | | | |
| | | | | | | | | | | AGGGTCG | | | | |
| FOXK1 | CTLA4 | CTLA4 | 221937 | NM_ | NC_ | 4755361 | sense | GCATTACCCCTAC | 128. | CCAAGCAT | 272. | CGG | 4 | 0.7131 |
| | | high | | 001037165. | 000007.14 | | | TACCGGA | | TACCCCTA | | | | |
| | | | | 1 | | | | | | CTACCGGA | | | | |
| | | | | | | | | | | CGGCCG | | | | |
| SMARCB1 | CTLA4 | CTLA4 | 6598 | NM_ | NC_ | 23791773 | anti- | GAGAACCTCGGA | 129. | TACAGAG | 273. | AGG | 2 | 0.731 |
| | | high | | 003073.3 | 000022.11 | | sense | ACATACGG | | AACCTCGG | | | | |
| | | | | | | | | | | AACATACG | | | | |
| | | | | | | | | | | GAGGTAG | | | | |
| SMARCB1 | CTLA4 | CTLA4 | 6598 | NM_ | NC_ | 23816887 | sense | GCAGATCGAGTCC | 130. | GACAGCA | 274. | CGG | 6 | 0.6894 |
| | | high | | 003073.3 | 000022.11 | | | TACCCCA | | GATCGAGT | | | | |
| | | | | | | | | | | CCTACCCC | | | | |
| | | | | | | | | | | ACGGACA | | | | |
| SMARCB1 | CTLA4 | CTLA4 | 6598 | NM_ | NC_ | 23801049 | anti- | TCTTCTTGTCTCG | 131. | GTTCTCTT | 275. | CGG | 4 | 0.6806 |
| | | high | | 003073.3 | 000022.11 | | sense | GCCCATG | | CTTGTCTC | | | | |
| | | | | | | | | | | GGCCCATG | | | | |
| | | | | | | | | | | CGGTTC | | | | |
| SMARCB1 | CTLA4 | CTLA4 | 6598 | NM_ | NC_ | 23803342 | sense | TGAGAACGCATCT | 132. | TCCATGAG | 276. | AGG | 5 | 0.6804 |
| | | high | | 003073.3 | 000022.11 | | | CAGCCCG | | AACGCATC | | | | |
| | | | | | | | | | | TCAGCCCG | | | | |
| | | | | | | | | | | AGGTGC | | | | |
| FLI1 | CTLA4 | CTLA4 | 2313 | NM_ | NC_ | 1.29E+08 | anti- | ACTCAATCGTGAG | 133. | TGACACTC | 277. | CGG | 5 | 0.6162 |
| | | high | | 002017.4 | 000011.10 | | sense | GATTGGT | | AATCGTGA | | | | |
| | | | | | | | | | | GGATTGGT | | | | |
| | | | | | | | | | | CGGTGT | | | | |
| FLI1 | CTLA4 | CTLA4 | 2313 | NM_ | NC_ | 1.29E+08 | sense | ACTGTGTAAAATG | 134. | AGGAACT | 278. | AGG | 4 | 0.8003 |
| | | high | | 002017.4 | 000011.10 | | | AACAAGG | | GTGTAAAA | | | | |
| | | | | | | | | | | TGAACAA | | | | |
| | | | | | | | | | | GGAGGAC | | | | |
| | | | | | | | | | | T | | | | |
| FLI1 | CTLA4 | CTLA4 | 2313 | NM_ | NC_ | 1.29E+08 | sense | CCAACATGACCAC | 135. | CCTCCCAA | 279. | AGG | 3 | 0.6923 |
| | | high | | 002017.4 | 000011.10 | | | CAACGAG | | CATGACCA | | | | |
| | | | | | | | | | | CCAACGA | | | | |
| | | | | | | | | | | GAGGAGA | | | | |
| FLI1 | CTLA4 | CTLA4 | 2313 | NM_ | NC_ | 1.29E+08 | anti- | CTTACCTGGATCC | 136. | TGAGCTTA | 280. | TGG | 2 | 0.7136 |
| | | high | | 002017.4 | 000011.10 | | sense | ATTCATG | | CCTGGATC | | | | |
| | | | | | | | | | | CATTCATG | | | | |
| | | | | | | | | | | TGGTCA | | | | |
| MYB | CTLA4 | CTLA4 | 4602 | NM_ | NC_ | 1.35E+08 | sense | ACCAGGCACACAA | 137. | ATTTACCA | 281. | GGG | 5 | 0.6859 |
| | | high | | 005375.2 | 000006.12 | | | GAGACTG | | GGCACAC | | | | |
| | | | | | | | | | | AAGAGAC | | | | |
| | | | | | | | | | | TGGGGAA | | | | |
| | | | | | | | | | | C | | | | |
| MYB | CTLA4 | CTLA4 | 4602 | NM_ | NC_ | 1.35E+08 | sense | AGAAATACGGTCC | 138. | GTACAGA | 282. | TGG | 5 | 0.6009 |
| | | high | | 005375.2 | 000006.12 | | | GAAACGT | | AATACGGT | | | | |
| | | | | | | | | | | CCGAAAC | | | | |
| | | | | | | | | | | GTTGGTCT | | | | |
| MYB | CTLA4 | CTLA4 | 4602 | NM_ | NC_ | 1.35E+08 | sense | AGTCTGGAAAGC | 139. | CCCAAGTC | 283. | GGG | 2 | 0.7063 |
| | | high | | 005375.2 | 000006.12 | | | GTCACTTG | | TGGAAAG | | | | |
| | | | | | | | | | | CGTCACTT | | | | |
| | | | | | | | | | | GGGGAAA | | | | |
| MYB | CTLA4 | CTLA4 | 4602 | NM_ | NC_ | 1.35E+08 | anti- | TATTTACATGTAA | 140. | ACTATATT | 284. | GGG | 7 | 0.6157 |
| | | high | | 005375.2 | 000006.12 | | sense | CGCTACA | | TACATGTA | | | | |
| | | | | | | | | | | ACGCTACA | | | | |
| | | | | | | | | | | GGGTAT | | | | |
| CBFB | CTLA4 | CTLA4 | 865 | NM_ | NC_ | 67036720 | anti- | AAGTCGACATACT | 141. | TTCTAAGT | 285. | AGG | 3 | 0.5993 |
| | | high | | 001755.2 | 000016.10 | | sense | CTCGGCT | | CGACATAC | | | | |
| | | | | | | | | | | TCTCGGCT | | | | |
| | | | | | | | | | | AGGTGT | | | | |
| CBFB | CTLA4 | CTLA4 | 865 | NM_ | NC_ | 67029479 | anti- | CCTGCCTCACCTC | 142. | CCCGCCTG | 286. | CGG | 1 | 0.6743 |
| | | high | | 001755.2 | 000016.10 | | sense | ACACTCG | | CCTCACCT | | | | |
| | | | | | | | | | | CACACTCG | | | | |
| | | | | | | | | | | CGGCTC | | | | |
| CBFB | CTLA4 | CTLA4 | 865 | NM_ | NC_ | 67029807 | anti- | GCCGACTTACGAT | 143. | GCCAGCC | 287. | CGG | 2 | 0.7383 |
| | | high | | 001755.2 | 000016.10 | | sense | TTCCGAG | | GACTTACG | | | | |
| | | | | | | | | | | ATTTCCGA | | | | |
| | | | | | | | | | | GCGGCCG | | | | |
| CBFB | CTLA4 | CTLA4 | 865 | NM_ | NC_ | 67066729 | sense | GGAGTCTGTGTTA | 144. | GAATGGA | 288. | AGG | 4 | 0.5938 |
| | | high | | 001755.2 | 000016.10 | | | TCTGGAA | | GTCTGTGT | | | | |
| | | | | | | | | | | TATCTGGA | | | | |
| | | | | | | | | | | AAGGCTG | | | | |

TABLE 2
Nuclear factors that can be inhibited to decrease CTLA4 expression or overexpressed to increase CTLA4 expression

| | | | | | | Position of | | | | | | | | Rule |
|---|---|---|---|---|---|---|---|---|---|---|---|---|---|---|
| | | | Target | | | Base After | | sgRNA | | | | | | Set |
| gene_ | screen_ | screen_ | Gene | Target | Genomic | Cut (1- | | Target | SEQ ID | | SEQ ID | PAM | Exon | 2 |
| id | target | direction | ID | Transcript | Sequence | based) | Strand | Sequence | NO: | Target Context Sequence | NO. | Sequence | Number | score |
| CTLA4 | CTLA4 | CTLA4 | 1493 | NM_005214.4 | NC_000002.12 | 2.04E+08 | sense | CCTCACTA | 289. | TGAACCTCACTATCCAAGGACTG | 381. | GGG | 2 | 0.6385 |
| | | low | | | | | | TCCAAGG | | AGGGCCA | | | | |
| | | | | | | | | ACTGA | | | | | | |
| CTLA4 | CTLA4 | CTLA4 | 1493 | NM_005214.4 | NC_000002.12 | 2.04E+08 | antisense | GCAGATG | 290. | CCGTGCAGATGGAATCATCTAG | 382. | AGG | 2 | 0.6184 |
| | | low | | | | | | GAATCAT | | GAAGGTCA | | | | |
| | | | | | | | | CTAGGA | | | | | | |
| CTLA4 | CTLA4 | CTLA4 | 1493 | NM_005214.4 | NC_000002.12 | 2.04E+08 | sense | TACCCACC | 291. | CATGTACCCACCGCCATACTACC | 383. | GGG | 2 | 0.6501 |
| | | low | | | | | | GCCATAC | | TGGGCAT | | | | |
| | | | | | | | | TACCT | | | | | | |
| CTLA4 | CTLA4 | CTLA4 | 1493 | NM_005214.4 | NC_000002.12 | 2.04E+08 | sense | TTCCATGC | 292. | GCTTTTCCATGCTAGCAATGCAC | 384. | TGG | 2 | 0.642 |
| | | low | | | | | | TAGCAAT | | GTGGCCC | | | | |
| | | | | | | | | GCACG | | | | | | |
| FOXP1 | CTLA4 | CTLA4 | 27086 | NM_032682.5 | NC_000003.12 | 71041428 | antisense | AGAGGAG | 293. | GTGCAGAGGAGGAGACACATGT | 385. | TGG | 11 | 0.6926 |
| | | low | | | | | | GAGACAC | | CGTGGTCA | | | | |
| | | | | | | | | ATGTCG | | | | | | |
| FOXP1 | CTLA4 | CTLA4 | 27086 | NM_032682.5 | NC_000003.12 | 71015617 | antisense | CATACACC | 294. | CTTGCATACACCATGTCCATAGA | 386. | AGG | 12 | 0.6547 |
| | | low | | | | | | ATGTCCAT | | GAGGATG | | | | |
| | | | | | | | | AGAG | | | | | | |
| FOXP1 | CTLA4 | CTLA4 | 27086 | NM_032682.5 | NC_000003.12 | 71046982 | sense | GCCTTCTG | 295. | CAAGGCCTTCTGACAATTCAGCC | 387. | GGG | 10 | 0.5683 |
| | | low | | | | | | ACAATTCA | | CGGGCAG | | | | |
| | | | | | | | | GCCC | | | | | | |
| FOXP1 | CTLA4 | CTLA4 | 27086 | NM_032682.5 | NC_000003.12 | 70988031 | antisense | GTTCTGTA | 296. | TTGGGTTCTGTAGACTTCACATG | 388. | AGG | 14 | 0.5925 |
| | | low | | | | | | GACTTCA | | CAGGTGG | | | | |
| | | | | | | | | CATGC | | | | | | |
| PTEN | CTLA4 | CTLA4 | 5728 | NM_001304718.1 | NC_000010.11 | 87961027 | sense | AGAGCGT | 297. | GTATAGAGCGTGCAGATAATGA | 389. | AGG | 8 | 0.7179 |
| | | low | | | | | | GCAGATA | | CAAGGAAT | | | | |
| | | | | | | | | ATGACA | | | | | | |
| PTEN | CTLA4 | CTLA4 | 5728 | NM_001304718.1 | NC_000010.11 | 87957861 | antisense | AGCTGGC | 298. | CTTTAGCTGGCAGACCACAAACT | 390. | AGG | 7 | 0.6493 |
| | | low | | | | | | AGACCAC | | GAGGATC | | | | |
| | | | | | | | | AAACTG | | | | | | |
| PTEN | CTLA4 | CTLA4 | 5728 | NM_001304718.1 | NC_000010.11 | 87960940 | sense | ATTCTTCA | 299. | ATACATTCTTCATACCAGGACCA | 391. | AGG | 8 | 0.6697 |
| | | low | | | | | | TACCAGG | | GAGGAAA | | | | |
| | | | | | | | | ACCAG | | | | | | |
| PTEN | CTLA4 | CTLA4 | 5728 | NM_001304718.1 | NC_000010.11 | 87957915 | sense | CCAATTCA | 300. | TCCTCCAATTCAGGACCCACACG | 392. | CGG | 7 | 0.6752 |
| | | low | | | | | | GGACCCA | | ACGGGAA | | | | |
| | | | | | | | | CACGA | | | | | | |
| FOXO1 | CTLA4 | CTLA4 | 2308 | NM_002015.3 | NC_000013.11 | 40665740 | antisense | ACAGGTT | 301. | TAGGACAGGTTGCCCCACGOGTT | 393. | CGG | 1 | 0.547 |
| | | low | | | | | | GCCCCAC | | GCGGCGG | | | | |
| | | | | | | | | GCGTTG | | | | | | |
| FOXO1 | CTLA4 | CTLA4 | 2308 | NM_002015.3 | NC_000013.11 | 40666107 | sense | GGAGTTT | 302. | GGCCGGAGTTTAGCCAGTCCAA | 394. | CGG | 1 | 0.629 |
| | | low | | | | | | AGCCAGT | | CTCGGCCA | | | | |
| | | | | | | | | CCAACT | | | | | | |
| FOXO1 | CTLA4 | CTLA4 | 2308 | NM_002015.3 | NC_000013.11 | 40560279 | antisense | GGTGGCG | 303. | GTTTGGTGGCGCAAACGAGTAG | 395. | CGG | 2 | 0.6741 |
| | | low | | | | | | CAAACGA | | CACGGCGT | | | | |
| | | | | | | | | GTAGCA | | | | | | |
| FOXO1 | CTLA4 | CTLA4 | 2308 | NM_002015.3 | NC_000013.11 | 40560544 | antisense | TAGCATTT | 304. | GTACTAGCATTTGAGCTAGTTCG | 396. | GGG | 2 | 0.6665 |
| | | low | | | | | | GAGCTAG | | AGGGCGA | | | | |
| | | | | | | | | TTCGA | | | | | | |
| MED12 | CTLA4 | CTLA4 | 9968 | NM_005120.2 | NC_000023.11 | 71130165 | sense | ACATCGA | 305. | ATCCACATCGACTGCTGGACAAT | 397. | AGG | 28 | 0.6457 |
| | | low | | | | | | CTGCTGG | | GAGGATG | | | | |
| | | | | | | | | ACAATG | | | | | | |
| MED12 | CTLA4 | CTLA4 | 9968 | NM_005120.2 | NC_000023.11 | 71122231 | antisense | CAGTGAG | 306. | CAGTCAGTGAGTAGTGCCAAAC | 398. | AGG | 8 | 0.688 |
| | | low | | | | | | TAGTGCC | | CAAGGCAC | | | | |
| | | | | | | | | AAACCA | | | | | | |
| MED12 | CTLA4 | CTLA4 | 9968 | NM_005120.2 | NC_000023.11 | 71125111 | antisense | GTGGCGT | 307. | ATGGGTGGCGTACTGCACGTGT | 399. | TGG | 15 | 0.6661 |
| | | low | | | | | | ACTGCAC | | CGTGGCTG | | | | |
| | | | | | | | | GTGTCG | | | | | | |
| MED12 | CTLA4 | CTLA4 | 9968 | NM_005120.2 | NC_000023.11 | 71126138 | sense | TTCACATT | 308. | ACCTTTCACATTATGACCAACAC | 400. | AGG | 18 | 0.6594 |
| | | low | | | | | | ATGACCA | | CAGGTCA | | | | |
| | | | | | | | | ACACC | | | | | | |
| IRF4 | CTLA4 | CTLA4 | 3662 | NM_001195286.1 | NC_000006.12 | 394977 | sense | CAGACCC | 309. | ATCTCAGACCCGTACAAAGTGTA | 401. | AGG | 3 | 0.5822 |
| | | low | | | | | | GTACAAA | | CAGGATT | | | | |
| | | | | | | | | GTGTAC | | | | | | |
| IRF4 | CTLA4 | CTLA4 | 3662 | NM_001195286.1 | NC_000006.12 | 397215 | sense | CCCATGA | 310. | ATGTCCCATGACGTTTGGACCCC | 402. | CGG | 5 | 0.7031 |
| | | low | | | | | | CGTTTGG | | GCGGCCA | | | | |
| | | | | | | | | ACCCCG | | | | | | |
| IRF4 | CTLA4 | CTLA4 | 3662 | NM_001195286.1 | NC_000006.12 | 401466 | sense | CTACCGG | 311. | TGTACTACCGGGAAATCCTCGTG | 403. | AGG | 7 | 0.6428 |
| | | low | | | | | | GAAATCC | | AAGGAGC | | | | |
| | | | | | | | | TCGTGA | | | | | | |
| IRF4 | CTLA4 | CTLA4 | 3662 | NM_001195286.1 | NC_000006.12 | 393251 | sense | CTGATCG | 312. | GTGGCTGATCGACCAGATCGAC | 404. | CGG | 2 | 0.6887 |
| | | low | | | | | | ACCAGAT | | AGCGGCAA | | | | |
| | | | | | | | | CGACAG | | | | | | |
| KMT2A | CTLA4 | CTLA4 | 4297 | NM_005933.3 | NC_000011.10 | 1.19E+08 | antisense | AAGATCA | 313. | ATTCAAGATCAGTAGCGGTCCCG | 405. | TGG | 27 | 0.7172 |
| | | low | | | | | | GTAGCGG | | GTGGTGG | | | | |
| | | | | | | | | TCCCGG | | | | | | |
| KMT2A | CTLA4 | CTLA4 | 4297 | NM_005933.3 | NC_000011.10 | 1.18E+08 | sense | AGAAAGG | 314. | GTAAAGAAAGGACGTCGATCGA | 406. | CGG | 5 | 0.6636 |
| | | low | | | | | | ACGTCGA | | GGCGGTGT | | | | |
| | | | | | | | | TCGAGG | | | | | | |
| KMT2A | CTLA4 | CTLA4 | 4297 | NM_005933.3 | NC_000011.10 | 1.18E+08 | antisense | AGGGGTC | 315. | GCCGAGGGGTCTTAATGATCCG | 407. | AGG | 3 | 0.757 |
| | | low | | | | | | TTAATGAT | | CGAGGAGA | | | | |
| | | | | | | | | CCGCG | | | | | | |
| KMT2A | CTLA4 | CTLA4 | 4297 | NM_005933.3 | NC_000011.10 | 1.18E+08 | sense | TTGACCAT | 316 | TCACTTGACCATAATTATGCTCA | 408. | TGG | 19 | 0.7229 |
| | | low | | | | | | AATTATG | | GTGGCAG | | | | |
| | | | | | | | | CTCAG | | | | | | |
| IKZFS | CTLA4 | CTLA4 | 22806 | NM_012481.4 | NC_000017.11 | 39792732 | sense | AAGATGA | 317. | TGGAAAGATGAACTGCGATGTG | 409. | TGG | 4 | 0.7182 |
| | | low | | | | | | ACTGCGA | | TGTGGATT | | | | |
| | | | | | | | | TGTGTG | | | | | | |
| IKZF3 | CTLA4 | CTLA4 | 22806 | NM_012481.4 | NC_000017.11 | 39788318 | sense | CAAGCAG | 318. | GTTACAAGCAGAGAAGTTCCCTT | 410. | AGG | 6 | 0.6635 |
| | | low | | | | | | AGAAGTT | | GAGGAGC | | | | |
| | | | | | | | | CCCTTG | | | | | | |
| IKZF3 | CTLA4 | CTLA4 | 22806 | NM_012481.4 | NC_000017.11 | 39766413 | sense | GCTCATA | 319. | GTGAGCTCATACAGACCCGCAT | 411. | TGG | 8 | 0.6101 |
| | | low | | | | | | CAGACCC | | GATGGACC | | | | |
| | | | | | | | | GCATGA | | | | | | |
| IKZF3 | CTLA4 | CTLA4 | 22806 | NM_012481.4 | NC_000017.11 | 39777693 | sense | GGACAGA | 320. | TACTGGACAGATTAGCAAGCAA | 412. | TGG | 7 | 0.7336 |
| | | low | | | | | | TTAGCAA | | TGTGGCAA | | | | |
| | | | | | | | | GCAATG | | | | | | |
| MED30 | CTLA4 | CTLA4 | 90390 | NM_080651.3 | NC_000008.11 | 1.18E+08 | sense | ACACTGG | 321. | TACCACACTGGAACATATCAAGA | 413. | CGG | 2 | 0.6317 |
| | | low | | | | | | AACATATC | | CCGGTTA | | | | |
| | | | | | | | | AAGAC | | | | | | |
| MED30 | CTLA4 | CTLA4 | 90390 | NM_080651.3 | NC_000008.11 | 1.18E+08 | sense | GACAAAT | 322. | ATATGACAAATGCAATGAAAACT | 414. | TGG | 2 | 0.7364 |
| | | low | | | | | | GCAATGA | | GTGGTGG | | | | |
| | | | | | | | | AAACTG | | | | | | |
| MED30 | CTLA4 | CTLA4 | 90390 | NM_080651.3 | NC_000008.11 | 1.18E+08 | sense | GGACATC | 323. | TGCAGGACATCGTGTACCGCACC | 415. | TGG | 1 | 0.6878 |
| | | low | | | | | | GTGTACC | | ATGGAGA | | | | |
| | | | | | | | | GCACCA | | | | | | |
| MED30 | CTLA4 | CTLA4 | 90390 | NM_080651.3 | NC_000008.11 | 1.18E+08 | sense | GGCCGCC | 324. | AGCAGGCCGCCCGGGAAGTCAA | 416. | CGG | 1 | 0.5967 |
| | | low | | | | | | CGGGAÅG | | CACGGCGT | | | | |
| | | | | | | | | TCAACA | | | | | | |
| IRF1 | CTLA4 | CTLA4 | 3659 | NM_002198.2 | NC_000005.10 | 1.32E+08 | sense | GAACTCC | 325. | CCATGAACTCCCTGCCAGATATC | 417. | AGG | 4 | 0.6297 |
| | | low | | | | | | CTGCCAG | | GAGGAGG | | | | |
| | | | | | | | | ATATCG | | | | | | |
| IRF1 | CTLA4 | CTLA4 | 3659 | NM_002198.2 | NC_000005.10 | 1.32E+08 | sense | TCTAGGC | 326. | GCCCTCTAGGCCGATACAAAGC | 418. | GGG | 4 | 0.718 |
| | | low | | | | | | CGATACA | | AGGGGAAA | | | | |
| | | | | | | | | AAGCAG | | | | | | |
| IRF1 | CTLA4 | CTLA4 | 3659 | NM_002198.2 | NC_000005.10 | 1.32E+08 | sense | TCTCCCTC | 327. | GCTTTCTCCCTCGACAGTCATGT | 419. | GGG | 6 | 0.6137 |
| | | low | | | | | | GACAGTC | | GGGGATT | | | | |
| | | | | | | | | ATGTG | | | | | | |
| IRF1 | CTLA4 | CTLA4 | 3659 | NM_002198.2 | NC_000005.10 | 1.32E+08 | sense | TTAATTCC | 328. | CAGATTAATTCCAACCAAATCCC | 420. | GGG | 2 | 0.7113 |
| | | low | | | | | | AACCAAA | | GGGGCTC | | | | |
| | | | | | | | | TCCCG | | | | | | |
| RELA | CTLA4 | CTLA4 | 5970 | NM_001243984.1 | NC_000011.10 | 65659757 | sense | ACTACGA | 329. | GGGGACTACGACCTGAATGCTG | 421. | CGG | 6 | 0.7259 |
| | | low | | | | | | CCTGAAT | | TGCGGCTC | | | | |
| | | | | | | | | GCTGTG | | | | | | |
| RELA | CTLA4 | CTLA4 | 5970 | NM_001243984.1 | NC_000011.10 | 65662009 | sense | GCTTCCG | 330. | ATGCGCTTCCGCTACAAGTGCGA | 422. | GGG | 3 | 0.7137 |
| | | low | | | | | | CTACAAG | | GGGGCGC | | | | |
| | | | | | | | | TGCGAG | | | | | | |
| RELA | CTLA4 | CTLA4 | 5970 | NM_001243984.1 | NC_000011.10 | 65658759 | antisense | GGAAGAT | 331. | AGTAGGAAGATCTCATCCCCACC | 423. | AGG | 7 | 0.7554 |
| | | low | | | | | | CTCATCCC | | GAGGCAG | | | | |
| | | | | | | | | CACCG | | | | | | |
| RELA | CTLA4 | CTLA4 | 5970 | NM_001243984.1 | NC_000011.10 | 65661818 | sense | TCAATGG | 332. | CAGATCAATGGCTACACAGGAC | 424. | GGG | 4 | 0.7164 |
| | | low | | | | | | CTACACA | | CAGGGACA | | | | |
| | | | | | | | | GGACCA | | | | | | |
| MED14 | CTLA4 | CTLA4 | 9282 | NM_004229.3 | NC_000023.11 | 40692233 | antisense | ATCACAC | 333. | TTGTATCACACATAGCGACGAAG | 425. | GGG | 15 | 0.6711 |
| | | low | | | | | | ATAGCGA | | TGGGCTA | | | | |
| | | | | | | | | CGAAGT | | | | | | |
| MED14 | CTLA4 | CTLA4 | 9282 | NM_004229.3 | NC_000023.11 | 40714644 | antisense | CAGAGCA | 334. | GGACCAGAGCATCTCTAGCTAAC | 426. | AGG | 4 | 0.6206 |
| | | low | | | | | | TCTCTAGC | | GAGGCCA | | | | |
| | | | | | | | | TAACG | | | | | | |
| MED14 | CTLA4 | CTLA4 | 9282 | NM_004229.3 | NC_000023.11 | 40682898 | antisense | CTAACTCT | 335. | AACACTAACTCTGCTACCCAAGT | 427. | CGG | 17 | 0.7032 |
| | | low | | | | | | GCTACCC | | GCGGTTA | | | | |
| | | | | | | | | AAGTG | | | | | | |
| MED14 | ICTLA4 | CTLA4 | 9282 | NM_004229.3 | NC_000023.11 | 40711237 | sense | TAATGTTA | 336. | ACTCTAATGTTAATCCGAGAACG | 428. | TGG | 8 | 0.6368 |
| | | low | | | | | | ATCCGAG | | GTGGGGA | | | | |
| | | | | | | | | AACGG | | | | | | |
| TAF5L | CTLA4 | CTLA4 | 27097 | NM_014409.3 | NC_000001.11 | 2.3E+08 | antisense | CGGGACA | 337. | GATGCGGGACACGTCTACTTGG | 429. | GGG | 4 | 0.6222 |
| | | low | | | | | | CGTCTACT | | TGGGGCTC | | | | |
| | | | | | | | | TGGTG | | | | | | |
| TAF5L | CTLA4 | \|CTLA4 | 27097 | NM_014409.3 | NC_000001.11 | 2.3E+08 | sense | GCAGAAC | 338. | TTCTGCAGAACGAGGCTGCCCTA | 430. | AGG | 4 | 0.6216 |
| | | low | | | | | | GAGGCTG | | GAGGTCT | | | | |
| | | | | | | | | CCCTAG | | | | | | |
| TAF5L | CTLA4 | CTLA4 | 27097 | NM_014409.3 | NC_000001.11 | 2.3E+08 | sense | GCGGACC | 339. | CACTGCGGACCAGTGTACAGCA | 431. | AGG | 5 | 0.7066 |
| | | low | | | | | | AGTGTAC | | CGAGGTTC | | | | |
| | | | | | | | | AGCACG | | | | | | |
| TAF5L | CTLA4 | CTLA4 | 27097 | NM_014409.3 | NC_000001.11 | 2.3E+08 | antisense | TAAGGTG | 340. | TATGTAAGGTGAGGACTTTGCAC | 432. | GGG | 4 | 0.6402 |
| | | low | | | | | | AGGACTT | | AGGGCAG | | | | |
| | | | | | | | | TGCACA | | | | | | |
| MTF1 | CTLA4 | CTLA4 | 4520 | NM_005955.2 | NC_000001.11 | 37835092 | sense | AATGCAC | 341. | ATACAATGCACTTCCACAACACA | 433. | TGG | 6 | 0.6619 |
| | | low | | | | | | TTCCACAA | | ATGGATC | | | | |
| | | | | | | | | CACAA | | | | | | |
| MTF1 | CTLA4 | CTLA4 | 4520 | NM_005955.2 | NC_000001.11 | 37857385 | antisense | AATGTGC | 342. | AGATAATGTGCTGCACATAACCC | 434. | GGG | 2 | 0.6361 |
| | | low | | | | | | TGCACAT | | TGGGACA | | | | |
| | | | | | | | | AACCCT | | | | | | |
| MTF1 | CTLA4 | CTLA4 | 4520 | NM_005955.2 | NC_000001.11 | 37839984 | sense | CCACGTG | 343. | GGATCCACGTGCGAGTGCACAC | 435. | AGG | 3 | 0.7358 |
| | | low | | | | | | CGAGTGC | | GAAGGAGA | | | | |
| | | | | | | | | ACACGA | | | | | | |
| MTF1 | CTLA4 | CTLA4 | 4520 | NM_005955.2 | NC_000001.11 | 37838644 | sense | GCACATT | 344. | GGAAGCACATTCGAACTCATACA | 436. | GGG | 4 | 0.7005 |
| | | low | | | | | | CGAACTC | | GGGGAAA | | | | |
| | | | | | | | | ATACAG | | | | | | |
| IKZF1 | CTLA4 | CTLA4 | 10320 | NM_006060.5 | NC_000007.14 | 50376659 | sense | GAAAATG | 345. | GAGAGAAAATGAATGGCTCCCA | 437. | GGG | 4 | 0.66 |
| | | low | | | | | | AATGGCT | | CAGGGACC | | | | |
| | | | | | | | | CCCACA | | | | | | |
| IKZF1 | CTLA4 | CTLA4 | 10320 | NM_006060.5 | NC_000007.14 | 50399996 | antisense | GATGGCT | 346. | TGTTGATGGCTTGGTCCATCACG | 438. | GGG | 8 | 0.7379 |
| | | low | | | | | | TGGTCCA | | TGGGACT | | | | |
| | | | | | | | | TCACGT | | | | | | |
| IKZF1 | CTLA4 | CTLA4 | 10320 | NM_006060.5 | NC_000007.14 | 50382586 | sense | GGGGCCT | 347 | GTGCGGGGCCTCATTCACCCAG | 439. | GGG | 5 | 0.6196 |
| | | low | | | | | | CATTCACC | | AAGGGCAA | | | | |
| | | | | | | | | CAGAA | | | | | | |
| IKZF1 | CTLA4 | CTLA4 | 10320 | NM_006060.5 | NC_000007.14 | 50327753 | sense | TCCAAGA | 348. | AAGCTCCAAGAGTGACAGAGTC | 440. | GGG | 3 | 0.617 |
| | | low | | | | | | GTGACAG | | GTGGGTAA | | | | |
| | | | | | | | | AGTCGT | | | | | | |
| BCL11B | CTLA4 | CTLA4 | 64919 | NM_001282237.1 | NC_000014.9 | 99175544 | sense | AGCAAGT | 349. | CAAGAGCAAGTCGTGCGAGTTC | 441. | CGG | 4 | 0.6246 |
| | | low | | | | | | CGTGCGA | | TGCGGCAA | | | | |
| | | | | | | | | GTTCTG | | | | | | |
| BCL11B | CTLA4 | CTLA4 | 64919 | NM_001282237.1 | NC_000014.9 | 99176056 | sense | CCAGCAG | 350. | CCGGCCAGCAGCTCGCTCACGCC | 442. | CGG | 4 | 0.6152 |
| | | low | | | | | | CTCGCTCA | | GCGGCTC | | | | |
| | | | | | | | | CGCCG | | | | | | |
| BCL11B | CTLA4 | CTLA4 | 64919 | NM_001282237.1 | NC_000014.9 | 99175744 | sense | CCGCCAT | 351. | TCGCCCGCCATGGACTTCTCGCG | 443. | CGG | 4 | 0.7423 |
| | | low | | | | | | GGACTTC | | GCGGCTC | | | | |
| | | | | | | | | TCGCGG | | | | | | |
| BCL11B | CTLA4 | CTLA4 | 64919 | NM_001282237.1 | NC_000014.9 | 99231381 | sense | TCAGGGT | 352. | GGACTCAGGGTGAGGGTCAGAC | 444 | AGG | 3 | 0.6195 |
| | | low | | | | | | GAGGGTC | | GGAGGCTC | | | | |
| | | | | | | | | AGACGG | | | | | | |
| STAT3 | CTLA4 | CTLA4 | 6774 | NM_139276.2 | NC_000017.11 | 42329588 | sense | AACATGG | 353. | GATGAACATGGAAGAATCCAAC | 445. | CGG | 13 | 0.6983 |
| | | low | | | | | | AAGAATC | | AACGGCAG | | | | |
| | | | | | | | | CAACAA | | | | | | |
| STAT3 | CTLA4 | CTLA4 | 6774 | NM_139276.2 | NC_000017.11 | 42333711 | antisense | ACGCCGG | 354. | CTGGACGCCGGTCTTGATGACG | 446. | GGG | 10 | 0.6587 |
| | | low | | | | | | TCTTGATG | | AGGGGCCG | | | | |
| | | | | | | | | ACGAG | | | | | | |
| STAT3 | CTLA4 | CTLA4 | 6774 | NM_139276.2 | NC_000017.11 | 42326141 | sense | GAGACCG | 355. | CTTTGAGACCGAGGTGTATCACC | 447. | AGG | 15 | 0.7276 |
| | | low | | | | | | AGGTGTA | | AAGGCCT | | | | |
| | | | | | | | | TCACCA | | | | | | |
| STAT3 | CTLA4 | CTLA4 | 6774 | NM_139276.2 | NC_000017.11 | 42333954 | antisense | TCGGCCG | 356. | AGCATCGGCCGGTGCTGTACAA | 448. | GGG | 9 | 0.6901 |
| | | low | | | | | | GTGCTGT | | TGGGGTCC | | | | |
| | | | | | | | | ACAATG | | | | | | |
| ZNF384 | CTLA4 | CTLA4 | 171017 | NM_001135734.2 | NC_000012.12 | 6678985 | sense | CGTTACCC | 357. | CGTCCGTTACCCAGAATATCACG | 449. | TGG | 4 | 0.835 |
| | | low | | | | | | AGAATAT | | GTGGTCC | | | | |
| | | | | | | | | CACGG | | | | | | |
| ZNF384 | CTLA4 | CTLA4 | 171017 | NM_001135734.2 | NC_000012.12 | 6673292 | sense | GCACATC | 358. | CCCAGCACATCCGTATACACTCA | 450. | GGG | 7 | 0.7689 |
| | | low | | | | | | CGTATAC | | GGGGCTA | | | | |
| | | | | | | | | ACTCAG | | | | | | |
| ZNF384 | CTLA4 | CTLA4 | 171017 | NM_001135734.2 | NC_000012.12 | 6678296 | sense | GGTAGCA | 359. | AGAAGGTAGCATCGACCCTAAC | 451. | AGG | 6 | 0.7069 |
| | | low | | | | | | TCGACCCT | | CGAGGAAG | | | | |
| | | | | | | | | AACCG | | | | | | |
| ZNF384 | CTLA4 | CTLA4 | 171017 | NM_001135734.2 | NC_000012.12 | 6672434 | antisense | TGGCCCC | 360. | GGCTTGGCCCCCGAGTGGATAC | 452. | AGG | 8 | 0.6923 |
| | | low | | | | | | CGAGTGG | | GGAGGTGC | | | | |
| | | | | | | | | ATACGG | | | | | | |
| BPTF | CTLA4 | CTLA4 | 2186 | NM_182641.3 | NC_000017.11 | 67912848 | sense | AAAGGAG | 361. | CTGTAAAGGAGCAGAGCAAAAC | 453. | TGG | 11 | 0.7483 |
| | | low | | | | | | CAGAGCA | | CGTGGTCA | | | | |
| | | | | | | | | AAACCG | | | | | | |
| BPTF | CTLA4 | CTLA4 | 2186 | NM_182641.3 | NC_000017.11 | 67911774 | antisense | ACTGCTAT | 362. | CTTCACTGCTATCCTGAATAGAC | 454. | CGG | 11 | 0.7291 |
| | | low | | | | | | CCTGAAT | | ACGGTAT | | | | |
| | | | | | | | | AGACA | | | | | | |
| BPTF | CTLA4 | \|CTLA4 | 2186 | NM_182641.3 | NC_000017.11 | 67854008 | antisense | GAGGACT | 363. | CTCAGAGGACTTGGGAAATTCA | 455. | GGG | 2 | 0.6802 |
| | | low | | | | | | TGGGAAA | | AGGGGCGG | | | | |
| | | | | | | | | TTCAAG | | | | | | |
| BPTF | CTLA4 | CTLA4 | 2186 | NM_182641.3 | NC_000017.11 | 67922881 | sense | GCCTTCG | 364. | AAAGGCCTTCGATCAAGTGCACT | 456. | CGG | 14 | 0.7554 |
| | | low | | | | | | ATCAAGT | | GCGGCCA | | | | |
| | | | | | | | | GCACTG | | | | | | |
| IL1R1 | CTLA4 | CTLA4 | 3554 | NM_000877.3 | NC_000002.12 | 1.02E+08 | antisense | AATAGTC | 365. | CTGTAATAGTCTTCCCCTAGCAC | 457. | GGG | 8 | 0.5943 |
| | | low | | | | | | TTCCCCTA | | TGGGTCA | | | | |
| | | | | | | | | GCACT | | | | | | |
| IL1R1 | CTLA4 | CTLA4 | 3554 | NM_000877.3 | NC_000002.12 | 1.02E+08 | antisense | ATTACAG | 366. | TGACATTACAGATCAATTGTATC | 458. | GGG | 8 | 0.5573 |
| | | low | | | | | | ATCAATT | | TGGGATC | | | | |
| | | | | | | | | GTATCT | | | | | | |
| IL1R1 | CTLA4 | CTLA4 | 3554 | NM_000877.3 | NC_000002.12 | 1.02E+08 | sense | CAAGCAA | 367. | TGGGCAAGCAATATCCTATTACC | 459. | GGG | 6 | 0.6217 |
| | | low | | | | | | TATCCTAT | | CGGGTAA | | | | |
| | | | | | | | | TACCC | | | | | | |
| IL1R1 | CTLA4 | CTLA4 | 3554 | NM_000877.3 | NC_000002.12 | 1.02E+08 | antisense | TTTGTGTT | 368. | TCTCTTTGTGTTGATGAATCCTG | 460. | AGG | 4 | 0.6689 |
| | | low | | | | | | GATGAAT | | GAGGCTT | | | | |
| | | | | | | | | CCTGG | | | | | | |
| MED11 | CTLA4 | CTLA4 | 400569 | NM_001001683.3 | NC_000017.11 | 4731567 | antisense | ATCCCGA | 369. | TCGCATCCCGAACCTGCATTCTG | 461. | AGG | 1 | 0.567 |
| | | low | | | | | | ACCTGCA | | AAGGATG | | | | |
| | | | | | | | | TTCTGA | | | | | | |
| MED11 | CTLA4 | CTLA4 | 400569 | NM_001001683.3 | NC_000017.11 | 4731863 | sense | CACCGCTT | 370. | CCTTCACCGCTTCAGTGCAACAC | 462. | TGG | 2 | 0.6458 |
| | | low | | | | | | CAGTGCA | | GTGGAGG | | | | |
| | | | | | | | | ACACG | | | | | | |
| MED11 | CTLA4 | CTLA4 | 400569 | NM_001001683.3 | NC_000017.11 | 4731814 | sense | CCAAGGA | 371. | TTGTCCAAGGAAAAAACTAACG | 463. | CGG | 2 | 0.6925 |
| | | low | | | | | | AAAAACT | | AGCGGCTC | | | | |
| | | | | | | | | AACGAG | | | | | | |
| MED11 | CTLA4 | CTLA4 | 400569 | NM_001001683.3 | NC_000017.11 | 4731833 | sense | GCGGCTC | 372. | ACGAGCGGCTCCTAGACCGGCA | 464. | CGG | 2 | 0.6487 |
| | | low | | | | | | CTAGACC | | GGCGGCGG | | | | |
| | | | | | | | | GGCAGG | | | | | | |
| KLF6 | CTLA4 | CTLA4 | 1316 | NM_001160124.1 | NC_000010.11 | 3781951 | antisense | TCGGAGG | 373. | GGGGTCGGAGGTAAACTTGGCC | 465. | GGG | 2 | 0.6468 |
| | | low | | | | | | TAAACTT | | GTGGGAGA | | | | |
| | | | | | | | | GGCCGT | | | | | | |
| KLF6 | CTLA4 | CTLA4 | 1316 | NM_001160124.1 | NC_000010.11 | 3782035 | antisense | TCTAAGTT | 374. | GGTCTCTAAGTTGTAACAAAAGC | 466. | CGG | 2 | 0.5276 |
| | | low | | | | | | GTAACAA | | TCGGGCT | | | | |
| | | | | | | | | AAGCT | | | | | | |
| KLF6 | CTLA4 | CTLA4 | 1316 | NM_001160124.1 | NC_000010.11 | 3782173 | antisense | TCTGAGG | 375. | GATTTCTGAGGCTGAAACATAGC | 467. | GGG | 2 | 0.671 |
| | | low | | | | | | CTGAAAC | | AGGGCTC | | | | |
| | | | | | | | | ATAGCA | | | | | | |
| KLF6 | CTLA4 | CTLA4 | 1316 | NM_001160124.1 | NC_000010.11 | 3784934 | antisense | TGCCAGT | 376. | CTGTTGCCAGTACTCCTCCAGAG | 468. | CGG | 1 | 0.6381 |
| | | low | | | | | | ACTCCTCC | | ACGGCAG | | | | |
| | | | | | | | | AGAGA | | | | | | |
| CREB1 | CTLA4 | CTLA4 | 1385 | NM_004379.3 | NC_000002.12 | 2.08E+08 | antisense | AGCTGTA | 377. | GGGCAGCTGTACTAGAGTTACG | 469. | GGG | 3 | 0.6415 |
| | | low | | | | | | CTAGAGT | | GTGGGAGC | | | | |
| | | | | | | | | TACGGT | | | | | | |
| CREB1 | CTLA4 | CTLA4 | 1385 | NM_004379.3 | NC_000002.12 | 2.08E+08 | sense | GGCTAAC | 378. | AGCTGGCTAACAATGGTACCGA | 470. | GGG | 6 | 0.7053 |
| | | low | | | | | | AATGGTA | | TGGGGTAC | | | | |
| | | | | | | | | CCGATG | | | | | | |
| CREB1 | CTLA4 | CTLA4 | 1385 | NM_004379.3 | NC_000002.12 | 2.08E+08 | antisense | TGGAGTT | 379. | AAATTGGAGTTGGCACCGTTACA | 471. | TGG | 5 | 0.6189 |
| | | low | | | | | | GGCACCG | | GTGGTGA | | | | |
| | | | | | | | | TTACAG | | | | | | |
| CREB1 | CTLA4 | CTLA4 | 1385 | NM_004379.3 | NC_000002.12 | 2.08E+08 | antisense | TGTGGAG | 380. | GACTTGTGGAGACTGAATAACT | 472. | TGG | 3 | 0.6776 |
| | | low | | | | | | ACTGAAT | | GATGGCTG | | | | |
| | | | | | | | | AACTGA | | | | | | |

TABLE 3
Nuclear factors that can be inhibited to increase FOXP3 expression or overexpressed to decrease FOXP3 expression

| | | | | | | Position of | | | | | | | | |
|---|---|---|---|---|---|---|---|---|---|---|---|---|---|---|
| | | | Target | | | Base After | | sgRNA | | Target | | | | |
| gene_ | screen_ | screen_ | Gene | Target | Genomic | Cut (1- | | Target | SEQ ID | Context | SEQ ID | PAM | Exon | Rule Set 2 |
| id | target | direction | ID | Transcript | Sequence | based) | Strand | Sequence | NO: | Sequence | NO. | Sequence | Number | score |
| TERF2 | FOXP3 | FOXP3 | 7014 | NM_005652.4 | NC_000016.10 | 69370578 | antisense | AAAGTTCT | 473. | ATGAAAA | 549. | GGG | 5 | 0.6289 |
| | | high | | | | | | GGATAAC | | GTTCTGGA | | | | |
| | | | | | | | | AGGAT | | TAACAGG | | | | |
| | | | | | | | | | | ATGGGCC | | | | |
| | | | | | | | | | | A | | | | |
| TERF2 | FOXP3 | FOXP3 | 7014 | NM_005652.4 | NC_000016.10 | 69385848 | sense | CGCGCGG | 474. | AGGGCGC | 550. | TGG | 1 | 0.6198 |
| | | high | | | | | | CGATCGG | | GCGGCGA | | | | |
| | | | | | | | | ACACGA | | TCGGACA | | | | |
| | | | | | | | | | | CGATGGC | | | | |
| | | | | | | | | | | GG | | | | |
| TERF2 | FOXP3 | FOXP3 | 7014 | NM_005652.4 | NC_000016.10 | 69385419 | sense | GGGTTAT | 475. | CTGCGGG | 551. | CGG | 2 | 0.6807 |
| | | high | | | | | | GCAGTGT | | TTATGCAG | | | | |
| | | | | | | | | CTGTCG | | TGTCTGTC | | | | |
| | | | | | | | | | | GCGGATT | | | | |
| TERF2 | FOXP3 | FOXP3 | 7014 | NM_005652.4 | NC_000016.10 | 69385628 | antisense | TCTGTCTG | 476. | CGGATCT | 552. | CGG | 1 | 0.6089 |
| | | high | | | | | | AAGTCCCC | | GTCTGAA | | | | |
| | | | | | | | | GTAC | | GTCCCCGT | | | | |
| | | | | | | | | | | ACCGGCT | | | | |
| | | | | | | | | | | A | | | | |
| FLI1 | FOXP3 | FOXP3 | 2313 | NM_002017.4 | NC_000011.10 | 1.29E+08 | antisense | ACTCAATC | 477. | TGACACTC | 553. | CGG | 5 | 0.6162 |
| | | high | | | | | | GTGAGGA | | AATCGTG | | | | |
| | | | | | | | | TTGGT | | AGGATTG | | | | |
| | | | | | | | | | | GTCGGTG | | | | |
| | | | | | | | | | | T | | | | |
| FLI1 | FOXP3 | FOXP3 | 2313 | NM_002017.4 | NC_000011.10 | 1.29E+08 | sense | ACTGTGTA | 478. | AGGAACT | 554. | AGG | 4 | 0.8003 |
| | | high | | | | | | AAATGAA | | GTGTAAA | | | | |
| | | | | | | | | CAAGG | | ATGAACA | | | | |
| | | | | | | | | | | AGGAGGA | | | | |
| | | | | | | | | | | CT | | | | |
| FLI1 | FOXP3 | FOXP3 | 2313 | NM_002017.4 | NC_000011.10 | 1.29E+08 | sense | CCAACATG | 479. | CCTCCCAA | 555. | AGG | 3 | 0.6923 |
| | | high | | | | | | ACCACCAA | | CATGACCA | | | | |
| | | | | | | | | CGAG | | CCAACGA | | | | |
| | | | | | | | | | | GAGGAGA | | | | |
| FLI1 | FOXP3 | FOXP3 | 2313 | NM_002017.4 | NC_000011.10 | 1.29E+08 | antisense | CTTACCTG | 480 | TGAGCTTA | 556. | TGG | 2 | 0.7136 |
| | | high | | | | | | GATCCATT | | CCTGGATC | | | | |
| | | | | | | | | CATG | | CATTCATG | | | | |
| | | | | | | | | | | TGGTCA | | | | |
| HMGA1 | FOXP3 | FOXP3 | 3159 | NM_145899.2 | NC_000006.12 | 34240847 | sense | AAAAGGA | 481. | CAGGAAA | 557. | CGG | 3 | 0.555 |
| | | high | | | | | | CGGCACT | | AGGACGG | | | | |
| | | | | | | | | GAGAAG | | CACTGAG | | | | |
| | | | | | | | | | | AAGCGGG | | | | |
| | | | | | | | | | | GC | | | | |
| HMGA1 | FOXP3 | FOXP3 | 3159 | NM_145899.2 | NC_000006.12 | 34240914 | sense | AGCGCTG | 482. | GGACAGC | 558. | TGG | 3 | 0.5867 |
| | | high | | | | | | GTAGGGA | | GCTGGTA | | | | |
| | | | | | | | | GTCAGG | | GGGAGTC | | | | |
| | | | | | | | | | | AGGTGGG | | | | |
| | | | | | | | | | | TG | | | | |
| HMGA1 | FOXP3 | FOXP3 | 3159 | NM_145899.2 | NC_000006.12 | 34242747 | sense | CCAACACC | 483. | AGTGCCA | 559. | GGG | 4 | 0.7288 |
| | | high | | | | | | TAAGAGA | | ACACCTAA | | | | |
| | | | | | | | | CCTCG | | GAGACCT | | | | |
| | | | | | | | | | | CGGGGCC | | | | |
| | | | | | | | | | | G | | | | |
| HMGA1 | FOXP3 | FOXP3 | 3159 | NM_145899.2 | NC_000006.12 | 34240883 | antisense | GCTGTCCC | 484. | CAGCGCT | 560. | AGG | 3 | 0.6102 |
| | | high | | | | | | GGGACTC | | GTCCCGG | | | | |
| | | | | | | | | ACCGG | | GACTCACC | | | | |
| | | | | | | | | | | GGAGGCT | | | | |
| | | | | | | | | | | G | | | | |
| KLF1 | FOXP3 | FOXP3 | 10661 | NM_006563.3 | NC_000019.10 | 12885695 | antisense | CCGCGGG | 485. | CGGTCCG | 561. | AGG | 2 | 0.6423 |
| | | high | | | | | | AAGTAGC | | CGGGAAG | | | | |
| | | | | | | | | CACCCG | | TAGCCACC | | | | |
| | | | | | | | | | | CGAGGAG | | | | |
| | | | | | | | | | | C | | | | |
| KLF1 | FOXP3 | FOXP3 | 10661 | NM_006563.3 | NC_000019.10 | 12885920 | antisense | CGGCGGC | 486. | CGGGCGG | 562. | CGG | 2 | 0.6145 |
| | | high | | | | | | GGATATT | | CGGCGGA | | | | |
| | | | | | | | | GCGCCC | | TATTGCGC | | | | |
| | | | | | | | | | | CCCGGAG | | | | |
| | | | | | | | | | | G | | | | |
| KLF1 | FOXP3 | FOXP3 | 10661 | NM_006563.3 | NC_000019.10 | 12885616 | antisense | GAGGCGC | 487. | TACTGAG | 563. | GGG | 2 | 0.6739 |
| | | high | | | | | | CGGGTAC | | GCGCCGG | | | | |
| | | | | | | | | ATCGCG | | GTACATCG | | | | |
| | | | | | | | | | | CGGGGTA | | | | |
| | | | | | | | | | | C | | | | |
| KLF1 | FOXP3 | FOXP3 | 10661 | NM_006563.3 | NC_000019.10 | 12885524 | antisense | GGGTCCC | 488. | TCCCGGGT | 564. | AGG | 2 | 0.6507 |
| | | high | | | | | | AAACAACT | | CCCAAACA | | | | |
| | | | | | | | | CAGGA | | ACTCAGG | | | | |
| | | | | | | | | | | AAGGAGG | | | | |
| MYBL2 | FOXP3 | FOXP3 | 4605 | NM_002466.3 | NC_000020.11 | 43682870 | sense | CAAGGGG | 489. | TTGTCAAG | 565. | AGG | 4 | 0.6606 |
| | | high | | | | | | CCATGGA | | GGGCCAT | | | | |
| | | | | | | | | CCAAAG | | GGACCAA | | | | |
| | | | | | | | | | | AGAGGAA | | | | |
| | | | | | | | | | | G | | | | |
| MYBL2 | FOXP3 | FOXP3 | 4605 | NM_002466.3 | NC_000020.11 | 43692255 | antisense | CTCCAGCA | 490. | CGAGCTCC | 566. | GGG | 6 | 0.6859 |
| | | high | | | | | | GCAAGTA | | AGCAGCA | | | | |
| | | | | | | | | CACTG | | AGTACACT | | | | |
| | | | | | | | | | | GGGGGCT | | | | |
| MYBL2 | FOXP3 | FOXP3 | 4605 | NM_002466.3 | NC_000020.11 | 43699865 | antisense | GCGTCCA | 491. | CACTGCGT | 567. | GGG | 7 | 0.6074 |
| | | high | | | | | | GATCTGTA | | CCAGATCT | | | | |
| | | | | | | | | CCGAT | | GTACCGAT | | | | |
| | | | | | | | | | | GGGCTC | | | | |
| MYBL2 | FOXP3 | FOXP3 | 4605 | NM_002466.3 | NC_000020.11 | 43702498 | antisense | TCAGGTCA | 492. | TTACTCAG | 568. | GGG | 8 | 0.6578 |
| | | high | | | | | | CACCAAG | | GTCACACC | | | | |
| | | | | | | | | CATCA | | AAGCATC | | | | |
| | | | | | | | | | | AGGGTCC | | | | |
| ZBTB1 | FOXP3 | FOXP3 | 22890 | NM_001123329.1 | NC_000014.9 | 64522022 | sense | AAATACAC | 493. | CGGTAAA | 569. | AGG | 2 | 0.6809 |
| | | high | | | | | | CACATAAT | | TACACCAC | | | | |
| | | | | | | | | AGAG | | ATAATAG | | | | |
| | | | | | | | | | | AGAGGCT | | | | |
| | | | | | | | | | | G | | | | |
| ZBTB1 | FOXP3 | FOXP3 | 22890 | NM_001123329.1 | NC_000014.9 | 64522356 | sense | GCACAGA | 494. | TTCTGCAC | 570. | AGG | 2 | 0.7303 |
| | | high | | | | | | CGGACAA | | AGACGGA | | | | |
| | | | | | | | | ATACAG | | CAAATACA | | | | |
| | | | | | | | | | | GAGGAGA | | | | |
| ZBTB1 | FOXP3 | FOXP3 | 22890 | NM_001123329.1 | NC_000014.9 | 64522796 | sense | GTGTGGA | 495. | AGCTGTGT | 571. | AGG | 2 | 0.7293 |
| | | high | | | | | | CTTACAAT | | GGACTTAC | | | | |
| | | | | | | | | AACCG | | AATAACC | | | | |
| | | | | | | | | | | GAGGAGG | | | | |
| ZBTB1 | FOXP3 | FOXP3 | 22890 | NM_001123329.1 | NC_000014.9 | 64522141 | sense | GTGTGTCA | 496. | GAACGTG | 572. | CGG | 2 | 0.6916 |
| | | high | | | | | | AGACGCTT | | TGTCAAG | | | | |
| | | | | | | | | TGGG | | ACGCTTTG | | | | |
| | | | | | | | | | | GGCGGAG | | | | |
| | | | | | | | | | | T | | | | |
| E2F4 | FOXP3 | FOXP3 | 1874 | NM_001950.3 | NC_000016.10 | 67193119 | sense | ACTAGACC | 497. | AAGAACT | 573. | GGG | 3 | 0.658 |
| | | high | | | | | | AGCACAA | | AGACCAG | | | | |
| | | | | | | | | GGTGT | | CACAAGG | | | | |
| | | | | | | | | | | TGTGGGT | | | | |
| | | | | | | | | | | GC | | | | |
| E2F4 | FOXP3 | FOXP3 | 1874 | NM_001950.3 | NC_000016.10 | 67193038 | antisense | CAGTTTGT | 498. | CAATCAGT | 574. | GGG | 3 | 0.6002 |
| | | high | | | | | | CAGCAATC | | TTGTCAGC | | | | |
| | | | | | | | | CCC | | AATCTCCC | | | | |
| | | | | | | | | | | GGGTAT | | | | |
| E2F4 | FOXP3 | FOXP3 | 1874 | NM_001950.3 | NC_000016.10 | 67194741 | sense | GAGTGTG | 499. | TGAAGAG | 575. | AGG | 6 | 0.6509 |
| | | high | | | | | | AGTGGTC | | TGTGAGT | | | | |
| | | | | | | | | CCATTG | | GGTCCCAT | | | | |
| | | | | | | | | | | TGAGGTTC | | | | |
| E2F4 | FOXP3 | FOXP3 | 1874 | NM_001950.3 | NC_000016.10 | 67193483 | antisense | GATGTCCT | 500. | TGCAGAT | 576. | AGG | 4 | 0.6736 |
| | | high | | | | | | CATGAGT | | GTCCTCAT | | | | |
| | | | | | | | | GACGT | | GAGTGAC | | | | |
| | | | | | | | | | | GTAGGCC | | | | |
| | | | | | | | | | | A | | | | |
| HINFP | FOXP3 | FOXP3 | 25988 | NM_015517.4 | NC_000011.10 | 1.19E+08 | sense | CACACCAA | 501. | CTACCACA | 577. | GGG | 4 | 0.6982 |
| | | high | | | | | | GCTGAAA | | CCAAGCT | | | | |
| | | | | | | | | CAGTG | | GAAACAG | | | | |
| | | | | | | | | | | TGGGGGC | | | | |
| | | | | | | | | | | T | | | | |
| HINFP | FOXP3 | FOXP3 | 25988 | NM_015517,4 | NC_000011.10 | 1.19E+08 | sense | CATGCGCT | 502. | ACCACATG | 578. | AGG | 8 | 0.7351 |
| | | high | | | | | | TTCGTCAC | | CGCTTTCG | | | | |
| | | | | | | | | AGTG | | TCACAGTG | | | | |
| | | | | | | | | | | AGGACC | | | | |
| HINFP | FOXP3 | FOXP3 | 25988 | NM_015517.4 | NC_000011.10 | 1.19E+08 | antisense | GGTGCTCT | 503. | CGGAGGT | 579. | CGG | 6 | 0.7508 |
| | | high | | | | | | CGAAGTTT | | GCTCTCGA | | | | |
| | | | | | | | | ACTG | | AGTTTACT | | | | |
| | | | | | | | | | | GCGGTCC | | | | |
| HINFP | FOXP3 | FOXP3 | 25988 | NM_015517.4 | NC_000011.10 | 1.19E+08 | antisense | TGACTACT | 504. | CCTCTGAC | 580. | AGG | 6 | 0.7145 |
| | | high | | | | | | TACGATCC | | TACTTACG | | | | |
| | | | | | | | | AATG | | ATCCAATG | | | | |
| | | | | | | | | | | AGGTCT | | | | |
| SP1 | FOXP3 | FOXP3 | 6667 | NM_001251825.1 | NC_000012.12 | 53382598 | sense | CAACAGA | 505. | AAACCAA | 581. | AGG | 3 | 0.6198 |
| | | high | | | | | | TTATCACA | | CAGATTAT | | | | |
| | | | | | | | | AATCG | | CACAAATC | | | | |
| | | | | | | | | | | GAGGAAG | | | | |
| SP1 | FOXP3 | FOXP3 | 6667 | NM_001251825.1 | NC_000012.12 | 53383311 | sense | CATCATCC | 506. | CCATCATC | 582. | TGG | 3 | 0.649 |
| | | high | | | | | | GGACACC | | ATCCGGA | | | | |
| | | | | | | | | AACAG | | CACCAACA | | | | |
| | | | | | | | | | | GTGGGGC | | | | |
| SP1 | FOXP3 | FOXP3 | 6667 | NM_001251825.1 | NC_000012.12 | 53382717 | sense | GTATGTG | 507. | CTCAGTAT | 583. | TGG | 3 | 0.6661 |
| | | high | | | | | | ACCAATGT | | GTGACCA | | | | |
| | | | | | | | | ACCAG | | ATGTACCA | | | | |
| | | | | | | | | | | GTGGCCC | | | | |
| SP1 | FOXP3 | FOXP3 | 6667 | NM_001251825.1 | NC_000012.12 | 53382986 | sense | TTACTACC | 508. | AACTTTAC | 584. | GGG | 3 | 0.7044 |
| | | high | | | | | | AGTGGAT | | TACCAGTG | | | | |
| | | | | | | | | CATCA | | GATCATCA | | | | |
| | | | | | | | | | | GGGACC | | | | |
| TP53 | FOXP3 | FOXP3 | 7157 | NM_000546.5 | NC_000017.11 | 7676227 | antisense | CCATTGTT | 509. | TGAACCAT | 585. | GGG | 4 | 0.6899 |
| | | high | | | | | | CAATATCG | | TGTTCAAT | | | | |
| | | | | | | | | TCCG | | ATCGTCCG | | | | |
| | | | | | | | | | | GGGACA | | | | |
| TP53 | FOXP3 | FOXP3 | 7157 | NM_000546.5 | NC_000017.11 | 7675058 | sense | GAGCGCT | 510. | CCATGAG | 586. | TGG | 5 | 0.6542 |
| | | high | | | | | | GCTCAGAT | | CGCTGCTC | | | | |
| | | | | | | | | AGCGA | | AGATAGC | | | | |
| | | | | | | | | | | GATGGTG | | | | |
| TP53 | FOXP3 | FOXP3 | 7157 | NM_000546.5 | NC_000017.11 | 7676527 | antisense | GATCCACT | 511. | AATGGAT | 587. | AGG | 2 | 0.6108 |
| | | high | | | | | | CACAGTTT | | CCACTCAC | | | | |
| | | | | | | | | CCAT | | AGTTTCCA | | | | |
| | | | | | | | | | | TAGGTCT | | | | |
| TP53 | FOXP3 | FOXP3 | 7157 | NM_000546.5 | NC_000017.11 | 7674864 | sense | GGTGCCCT | 512. | TGGTGGT | 588. | AGG | 6 | 0.6259 |
| | | high | | | | | | ATGAGCC | | GCCCTATG | | | | |
| | | | | | | | | GCCTG | | AGCCGCCT | | | | |
| | | | | | | | | | | GAGGTCT | | | | |
| MAF | FOXP3 | FOXP3 | 4094 | NM_005360.4 | NC_000016.10 | 79599622 | sense | GAAGACT | 513. | CCTGGAA | 589. | CGG | 1 | 0.5494 |
| | | high | | | | | | ACTACTGG | | GACTACTA | | | | |
| | | | | | | | | ATGAC | | CTGGATG | | | | |
| | | | | | | | | | | ACCGGCT | | | | |
| | | | | | | | | | | A | | | | |
| MAF | FOXP3 | FOXP3 | 4094 | NM_005360.4 | NC_000016.10 | 79599416 | antisense | GATCACG | 514. | CGGCGAT | 590. | CGG | 1 | 0.7152 |
| | | high | | | | | | GCGGACA | | CACGGCG | | | | |
| | | | | | | | | CCACGG | | GACACCA | | | | |
| | | | | | | | | | | CGGCGGC | | | | |
| | | | | | | | | | | GG | | | | |
| MAF | FOXP3 | FOXP3 | 4094 | NM_005360.4 | NC_000016.10 | 79599725 | antisense | GCTGCAC | 515. | CCGAGCT | 591. | GGG | 1 | 0.7019 |
| | | high | | | | | | GGCGTGC | | GCACGGC | | | | |
| | | | | | | | | TCATGG | | GTGCTCAT | | | | |
| | | | | | | | | | | GGGGGTG | | | | |
| | | | | | | | | | | G | | | | |
| MAF | FOXP3 | FOXP3 | 4094 | NM_005360.4 | NC_000016.10 | 79599797 | sense | TGAAGTG | 516. | AGTTTGAA | 592. | TGG | 1 | 0.6793 |
| | | high | | | | | | AAAAAGG | | GTGAAAA | | | | |
| | | | | | | | | AACCGG | | AGGAACC | | | | |
| | | | | | | | | | | GGTGGAG | | | | |
| | | | | | | | | | | A | | | | |
| MBD2 | FOXP3 | FOXP3 | 8932 | NM_003927.4 | NC_000018.10 | 54224170 | sense | AGCCGGT | 517. | CGGGAGC | 593. | GGG | 1 | 0.5949 |
| | | high | | | | | | CCCTTTCC | | CGGTCCCT | | | | |
| | | | | | | | | CGTCG | | TTCCCGTC | | | | |
| | | | | | | | | | | GGGGAGC | | | | |
| MBD2 | FOXP3 | FOXP3 | 8932 | NM_003927.4 | NC_000018.10 | 54205113 | sense | CCTCAGTT | 518. | CAAGCCTC | 594. | GGG | 2 | 0.5818 |
| | | high | | | | | | GGCAAGG | | AGTTGGC | | | | |
| | | | | | | | | TACCT | | AAGGTAC | | | | |
| | | | | | | | | | | CTGGGAA | | | | |
| | | | | | | | | | | A | | | | |
| MBD2 | FOXP3 | FOXP3 | 8932 | NM_003927.4 | NC_000018.10 | 54204999 | sense | CCTCTCAA | 519. | CGATCCTC | 595. | TGG | 2 | 0.5401 |
| | | high | | | | | | TCAAAATA | | TCAATCAA | | | | |
| | | | | | | | | AGGT | | AATAAGG | | | | |
| | | | | | | | | | | TTGGTTA | | | | |
| MBD2 | FOXP3 | FOXP3 | 8932 | NM_003927.4 | NC_000018.10 | 54224048 | sense | CGAAAAT | 520. | GATCCGA | 596. | TGG | 1 | 0.494 |
| | | high | | | | | | CTGGGCT | | AAATCTG | | | | |
| | | | | | | | | AAGTGC | | GGCTAAG | | | | |
| | | | | | | | | | | TGCTGGC | | | | |
| | | | | | | | | | | AA | | | | |
| SMARCB1 | FOXP3 | FOXP3 | 6598 | NM_003073.3 | NC_000022.11 | 23791773 | antisense | GAGAACC | 521. | TACAGAG | 597. | AGG | 2 | 0.731 |
| | | high | | | | | | TCGGAAC | | AACCTCG | | | | |
| | | | | | | | | ATACGG | | GAACATA | | | | |
| | | | | | | | | | | CGGAGGT | | | | |
| | | | | | | | | | | AG | | | | |
| SMARCB1 | FOXP3 | FOXP3 | 6598 | NM_003073.3 | NC_000022.11 | 23816887 | sense | GCAGATC | 522. | GACAGCA | 598. | CGG | 6 | 0.6894 |
| | | high | | | | | | GAGTCCTA | | GATCGAG | | | | |
| | | | | | | | | CCCCA | | TCCTACCC | | | | |
| | | | | | | | | | | CACGGAC | | | | |
| | | | | | | | | | | A | | | | |
| SMARCB1 | FOXP3 | FOXP3 | 6598 | NM_003073.3 | NC_000022.11 | 23801049 | antisense | TCTTCTTG | 523. | GTTCTCTT | 599. | CGG | 4 | 0.6806 |
| | | high | | | | | | TCTCGGCC | | CTTGTCTC | | | | |
| | | | | | | | | CATG | | GGCCCAT | | | | |
| | | | | | | | | | | GCGGTTC | | | | |
| SMARCB1 | FOXP3 | FOXP3 | 6598 | NM_003073.3 | NC_000022.11 | 23803342 | sense | TGAGAAC | 524. | TCCATGAG | 600. | AGG | 5 | 0.6804 |
| | | high | | | | | | GCATCTCA | | AACGCATC | | | | |
| | | | | | | | | GCCCG | | TCAGCCCG | | | | |
| | | | | | | | | | | AGGTGC | | | | |
| ETS1 | FOXP3 | FOXP3 | 2113 | NM_005238.3 | NC_000022.11 | 1.28E+08 | antisense | CTTACTAA | 525. | TGAACTTA | 601. | AGG | 4 | 0.6808 |
| | | high | | | | | | TGAAGTA | | CTAATGAA | | | | |
| | | | | | | | | ATCCG | | GTAATOCG | | | | |
| | | | | | | | | | | AGGTAT | | | | |
| ETS1 | FOXP3 | FOXP3 | 2113 | NM_005238.3 | NC_000022.11 | 1.28E+08 | antisense | GAGAAAG | 526. | GCTCGAG | 602. | GGG | 3 | 0.6487 |
| | | high | | | | | | CAGTCTTT | | AAAGCAG | | | | |
| | | | | | | | | ACCCA | | TCTTTACC | | | | |
| | | | | | | | | | | CAGGGCG | | | | |
| | | | | | | | | | | C | | | | |
| ETS1 | FOXP3 | FOXP3 | 2113 | NM_005238.3 | NC_000022.11 | 1.28E+08 | antisense | GGTCTCG | 527. | AGAGGGT | 603. | GGG | 5 | 0.7649 |
| | | high | | | | | | GAGAATG | | CTCGGAG | | | | |
| | | | | | | | | ACCGAG | | AATGACC | | | | |
| | | | | | | | | | | GAGGGGT | | | | |
| | | | | | | | | | | AG | | | | |
| ETS1 | FOXP3 | FOXP3 | 2113 | NM_005238.3 | NC_000022.11 | 1.28E+08 | sense | TGCATGG | 528. | CATGTGCA | 604. | TGG | 5 | 0.6503 |
| | | high | | | | | | GGAGGAC | | TGGGGAG | | | | |
| | | | | | | | | CAGTCG | | GACCAGT | | | | |
| | | | | | | | | | | CGTGGTA | | | | |
| | | | | | | | | | | G | | | | |
| ZBTB7A | FOXP3 | FOXP3 | 51341 | NM_015898.2 | NC_000019.10 | 4054925 | sense | ACCGTCA | 529. | GCTCACCG | 605. | GGG | 2 | 0.6826 |
| | | high | | | | | | GCACAGC | | TCAGCACA | | | | |
| | | | | | | | | CAACGT | | GCCAACG | | | | |
| | | | | | | | | | | TGGGTGA | | | | |
| ZBTB7A | FOXP3 | FOXP3 | 51341 | NM_015898.2 | NC_000019.10 | 4054671 | antisense | ATCATCGG | 530. | GGTCATCA | 606. | CGG | 2 | 0.6019 |
| | | high | | | | | | ACGCCCCA | | TCGGACG | | | | |
| | | | | | | | | AAGG | | CCCCAAA | | | | |
| | | | | | | | | | | GGCGGAC | | | | |
| | | | | | | | | | | C | | | | |
| ZBTB7A | FOXP3 | FOXP3 | 51341 | NM_015898.2 | NC_000019.10 | 4054199 | sense | GAGTCGC | 531. | CGAGGAG | 607. | GGG | 2 | 0.6111 |
| | | high | | | | | | GGGCCGA | | TCGCGGG | | | | |
| | | | | | | | | CGACAA | | CCGACGA | | | | |
| | | | | | | | | | | CAAGGGC | | | | |
| | | | | | | | | | | GT | | | | |
| ZBTB7A | FOXP3 | FOXP3 | 51341 | NM_015898.2 | NC_000019.10 | 4054431 | antisense | GCCGTAG | 532. | CGCGGCC | 608. | TGG | 2 | 0.6268 |
| | | high | | | | | | TGGCCGTT | | GTAGTGG | | | | |
| | | | | | | | | CTGCG | | CCGTTCTG | | | | |
| | | | | | | | | | | CGTGGCG | | | | |
| | | | | | | | | | | G | | | | |
| MYB | FOXP3 | FOXP3 | 4602 | NM_005375.2 | NC_000006.12 | 1.35E+08 | sense | ACCAGGC | 533. | ATTTACCA | 609. | GGG | 5 | 0.6859 |
| | | high | | | | | | ACACAAG | | GGCACAC | | | | |
| | | | | | | | | AGACTG | | AAGAGAC | | | | |
| | | | | | | | | | | TGGGGAA | | | | |
| | | | | | | | | | | C | | | | |
| MYB | FOXP3 | FOXP3 | 4602 | NM_005375.2 | NC_000006.12 | 1.35E+08 | sense | AGAAATA | 534. | GTACAGA | 610. | TGG | 5 | 0.6009 |
| | | high | | | | | | CGGTCCG | | AATACGG | | | | |
| | | | | | | | | AAACGT | | TCCGAAAC | | | | |
| | | | | | | | | | | GTTGGTCT | | | | |
| MYB | FOXP3 | FOXP3 | 4602 | NM_005375.2 | NC_000006.12 | 1.35E+08 | sense | AGTCTGG | 535. | CCCAAGTC | 611. | GGG | 2 | 0.7063 |
| | | high | | | | | | AAAGCGT | | TGGAAAG | | | | |
| | | | | | | | | CACTTG | | CGTCACTT | | | | |
| | | | | | | | | | | GGGGAAA | | | | |
| MYB | FOXP3 | FOXP3 | 4602 | NM_005375.2 | NC_000006.12 | 1.35E+08 | antisense | TATTTACA | 536. | ACTATATT | 612. | GGG | 7 | 0.6157 |
| | | high | | | | | | TGTAACGC | | TACATGTA | | | | |
| | | | | | | | | TACA | | ACGCTACA | | | | |
| | | | | | | | | | | GGGTAT | | | | |
| SATB1 | FOXP3 | FOXP3 | 6304 | NM_002971.4 | NC_000006.12 | 18415117 | antisense | ATGCTAA | 537. | TTCTATGC | 613. | GGG | 5 | 0.6378 |
| | | high | | | | | | GTACCTGT | | TAAGTACC | | | | |
| | | | | | | | | GAAAG | | TGTGAAA | | | | |
| | | | | | | | | | | GGGGGCA | | | | |
| SATB1 | FOXP3 | FOXP3 | 6304 | NM_002971.4 | NC_000006.12 | 18417016 | sense | CATTGAAT | 538. | ACGCCATT | 614. | AGG | 3 | 0.7747 |
| | | high | | | | | | ATGATTGC | | GAATATG | | | | |
| | | | | | | | | AAGG | | ATTGCAA | | | | |
| | | | | | | | | | | GGAGGAG | | | | |
| | | | | | | | | | | C | | | | |
| SATB1 | FOXP3 | FOXP3 | 6304 | NM_002971.4 | NC_000006.12 | 18394751 | antisense | TAGGTGTT | 539. | CTGATAG | 615. | GGG | 7 | 0.6656 |
| | | high | | | | | | GATACGA | | GTGTTGAT | | | | |
| | | | | | | | | GCCCA | | ACGAGCC | | | | |
| | | | | | | | | | | CAGGGTG | | | | |
| | | | | | | | | | | C | | | | |
| SATB1 | FOXP3 | FOXP3 | 6304 | NM_002971.4 | NC_000006.12 | 18394610 | antisense | TATTCATA | 540. | GGCTTATT | 616. | GGG | 7 | 0.6676 |
| | | high | | | | | | GATCTACT | | CATAGATC | | | | |
| | | | | | | | | GACA | | TACTGACA | | | | |
| | | | | | | | | | | GGGGGA | | | | |
| TFDP1 | FOXP3 | FOXP3 | 7027 | NM_007111.4 | NC_000013.11 | 1.14E+08 | sense | ACCGGCA | 541. | AGAGACC | 617. | TGG | 5 | 0.6315 |
| | | high | | | | | | GCGTCAA | | GGCAGCG | | | | |
| | | | | | | | | ACACCC | | TCAAACAC | | | | |
| | | | | | | | | | | CCTGGTG | | | | |
| | | | | | | | | | | G | | | | |
| TFDP1 | FOXP3 | FOXP3 | 7027 | NM_007111.4 | NC_000013.11 | 1.14E+08 | sense | ATGACCA | 542. | GCTTATGA | 618. | CGG | 7 | 0.6204 |
| | | high | | | | | | GAAAAAC | | CCAGAAA | | | | |
| | | | | | | | | ATAAGA | | AACATAA | | | | |
| | | | | | | | | | | GACGGCG | | | | |
| | | | | | | | | | | C | | | | |
| TFDP1 | FOXP3 | FOXP3 | 7027 | NM_007111.4 | NC_000013.11 | 1.14E+08 | antisense | CCTTCATG | 543. | CAGACCTT | 619. | AGG | 6 | 0.6851 |
| | | high | | | | | | GAGAAAT | | CATGGAG | | | | |
| | | | | | | | | GCCGT | | AAATGCC | | | | |
| | | | | | | | | | | GTAGGCC | | | | |
| | | | | | | | | | | C | | | | |
| TFDP1 | FOXP3 | FOXP3 | 7027 | NM_007111.4 | NC_000013.11 | 1.14E+08 | sense | GGTGCAG | 544. | ACCTGGT | 620. | CGG | 9 | 0.6402 |
| | | high | | | | | | AGAAACC | | GCAGAGA | | | | |
| | | | | | | | | GGCATG | | AACCGGC | | | | |
| | | | | | | | | | | ATGCGGA | | | | |
| | | | | | | | | | | GC | | | | |
| DNMT1 | FOXP3 | FOXP3 | 1786 | NM_001379.2 | NC_000019.10 | 10146475 | sense | GAGGCAA | 545. | AGATGAG | 621. | GGG | 27 | 0.7285 |
| | | high | | | | | | AAAGAAA | | GCAAAAA | | | | |
| | | | | | | | | TCCCCA | | GAAATCCC | | | | |
| | | | | | | | | | | CAGGGTC | | | | |
| | | | | | | | | | | C | | | | |
| DNMT1 | FOXP3 | FOXP3 | 1786 | NM_001379.2 | NC_000019.10 | 10162681 | sense | GATTTCTG | 546. | CACAGATT | 622. | AGG | 12 | 0.7345 |
| | | high | | | | | | ATGAAAA | | TCTGATGA | | | | |
| | | | | | | | | AGACG | | AAAAGAC | | | | |
| | | | | | | | | | | GAGGATG | | | | |
| DNMT1 | FOXP3 | FOXP3 | 1786 | NM_001379.2 | NC_000019.10 | 10142150 | sense | GCTCTACT | 547. | ACCTGCTC | 623. | AGG | 29 | 0.6656 |
| | | high | | | | | | GGAGCGA | | TACTGGA | | | | |
| | | | | | | | | CGAGG | | GCGACGA | | | | |
| | | | | | | | | | | GGAGGCC | | | | |
| | | | | | | | | | | G | | | | |
| DNMT1 | FOXP3 | FOXP3 | 1786 | NM_001379.2 | NC_000019.10 | 10151459 | sense | TCACCCAA | 548. | GCCGTCAC | 624. | GGG | 23 | 0.7089 |
| | | high | | | | | | AAAAATG | | CCAAAAA | | | | |
| | | | | | | | | CACCA | | AATGCACC | | | | |
| | | | | | | | | | | AGGGGAA | | | | |

TABLE 4
Nuclear factors that can be inhibited to decrease FOXP3 expression or overexpressed to increase FOXP3 expression

| | | | | | | Position | | | | | | | | |
|---|---|---|---|---|---|---|---|---|---|---|---|---|---|---|
| | | screen_ | | | | of Base | | sgRNA | SEQ | Target | SEQ | | | Rule |
| gene_ | screen_ | di- | Target | Target | Genomic | After Cut | | Target | ID | Context | ID | PAM | Exon | Set 2 |
| id | target | rection | Gene ID | Transcript | Sequence | (1-based) | Strand | Sequence | NO: | Sequence | NO: | Sequence | Number | score |
| PTEN | FOXP3 | FOXP3 low | 5728 | NM_ | NC_ | 87961027 | sense | AGAGCGT | 625. | GTATAGA | 693. | AGG | 8 | 0.7179 |
| | | | | 001304718.1 | 000010.11 | | | GCAGATA | | GCGTGCA | | | | |
| | | | | | | | | ATGACA | | GATAATG | | | | |
| | | | | | | | | | | ACAAGGA | | | | |
| | | | | | | | | | | AT | | | | |
| PTEN | FOXP3 | FOXP3 low | 5728 | NM_ | NC_ | 87957861 | anti- | AGCTGGC | 626. | CTTTAGCT | 694. | AGG | 7 | 0.6493 |
| | | | | 001304718.1 | 000010.11 | | sense | AGACCAC | | GGCAGAC | | | | |
| | | | | | | | | AAACTG | | CACAAACT | | | | |
| | | | | | | | | | | GAGGATC | | | | |
| PTEN | FOXP3 | FOXP3 low | 5728 | NM_ | NC_ | 87960940 | sense | ATTCTTCA | 627. | ATACATTC | 695. | AGG | 8 | 0.6697 |
| | | | | 001304718.1 | 000010.11 | | | TACCAGG | | TTCATACC | | | | |
| | | | | | | | | ACCAG | | AGGACCA | | | | |
| | | | | | | | | | | GAGGAAA | | | | |
| PTEN | FOXP3 | FOXP3 low | 5728 | NM_ | NC_ | 87957915 | sense | CCAATTCA | 628. | TCCTCCAA | 696. | CGG | 7 | 0.6752 |
| | | | | 001304718.1 | 000010.11 | | | GGACCCA | | TTCAGGAC | | | | |
| | | | | | | | | CACGA | | CCACACG | | | | |
| | | | | | | | | | | ACGGGAA | | | | |
| GATA3 | FOXP3 | FOXP3 low | 2625 | NM_ | NC_ | 8055892 | sense | AGGTACC | 629. | GCAGAGG | 697. | CGG | 2 | 0.6857 |
| | | | | 002051.2 | 000010.11 | | | CTCCGACC | | TACCCTCC | | | | |
| | | | | | | | | CACCA | | GACCCACC | | | | |
| | | | | | | | | | | ACGGTGA | | | | |
| GATA3 | FOXP3 | FOXP3 low | 2625 | NM_ | NC | 8064014 | sense | CAGGGAG | 630. | AAGGCAG | 698. | GGG | 4 | 0.737 |
| | | | | 002051.2 | 000010.11 | | | TGTGTGA | | GGAGTGT | | | | |
| | | | | | | | | ACTGTG | | GTGAACT | | | | |
| | | | | | | | | | | GTGGGGC | | | | |
| | | | | | | | | | | AA | | | | |
| GATA3 | FOXP3 | FOXP3 low | 2625 | NM_ | NC_ | 8058740 | anti- | GGAGCTG | 631. | GTCCGGA | 699. | AGG | 3 | 0.6273 |
| | | | | 002051.2 | 000010.11 | | sense | TACTCGG | | GCTGTACT | | | | |
| | | | | | | | | GCACGT | | CGGGCAC | | | | |
| | | | | | | | | | | GTAGGGC | | | | |
| | | | | | | | | | | G | | | | |
| GATA3 | FOXP3 | FOXP3 low | 2625 | NM_ | NC_ | 8058432 | sense | TCCAAGAC | 632. | CTTCTCCA | 700. | CGG | 3 | 0.7243 |
| | | | | 002051.2 | 000010.11 | | | GTCCATCC | | AGACGTC | | | | |
| | | | | | | | | ACCA | | CATCCACC | | | | |
| | | | | | | | | | | ACGGCTC | | | | |
| STAT5B | FOXP3 | FOXP3 low | 6777 | NM_ | NC_ | 42216055 | sense | CAGCCAG | 633. | ATGGCAG | 701. | CGG | 12 | 0.6375 |
| | | | | 401248.3 | 000017.11 | | | GACAACA | | CCAGGAC | | | | |
| | | | | | | | | ATGCGA | | AACAATG | | | | |
| | | | | | | | | | | CGACGGC | | | | |
| | | | | | | | | | | CA | | | | |
| STAT5B | FOXP3 | FOXP3 low | 6777 | NM_ | NC_ | 42227658 | anti- | GTGGCCTT | 634. | CTGGGTG | 702. | TGG | 3 | 0.6157 |
| | | | | 012448.3 | 000017.11 | | sense | AATGTTCT | | GCCTTAAT | | | | |
| | | | | | | | | CCTG | | GTTCTCCT | | | | |
| | | | | | | | | | | GTGGATT | | | | |
| STAT5B | FOXP3 | FOXP3 low | 6777 | NM_ | NC_ | 42224822 | anti- | GTTCATTG | 635. | CTCTGTTC | 703. | CGG | 4 | 0.6583 |
| | | | | 012448.3 | 000017.11 | | sense | TACAATAT | | ATTGTACA | | | | |
| | | | | | | | | ATGG | | ATATATGG | | | | |
| | | | | | | | | | | CGGATG | | | | |
| STAT5B | FOXP3 | FOXP3 low | 6777 | NM_ | NC_ | 42217252 | sense | TAAGAGG | 636. | GAATTAA | 704. | GGG | 11 | 0.7097 |
| | | | | 012448.3 | 000017.11 | | | TCAGACC | | GAGGTCA | | | | |
| | | | | | | | | GTCGTG | | GACCGTC | | | | |
| | | | | | | | | | | GTGGGGC | | | | |
| | | | | | | | | | | AG | | | | |
| MED30 | FOXP3 | FOXP3 low | 90390 | NM_ | NC_ | 1.18E+08 | sense | ACACTGG | 637. | TACCACAC | 705. | CGG | 2 | 0.6317 |
| | | | | 080651.3 | 000008.11 | | | AACATATC | | TGGAACA | | | | |
| | | | | | | | | AAGAC | | TATCAAGA | | | | |
| | | | | | | | | | | CCGGTTA | | | | |
| MED30 | FOXP3 | FOXP3 low | 90390 | NM_ | NC_ | 1.18E+08 | sense | GACAAAT | 638. | ATATGACA | 706. | TGG | 2 | 0.7364 |
| | | | | 080651.3 | 000008.11 | | | GCAATGA | | AATGCAAT | | | | |
| | | | | | | | | AAACTG | | GAAAACT | | | | |
| | | | | | | | | | | GTGGTGG | | | | |
| MED30 | FOXP3 | FOXP3 low | 90390 | NM_ | NC_ | 1.18E+08 | sense | GGACATC | 639. | TGCAGGA | 707. | TGG | 1 | 0.6878 |
| | | | | 080651.3 | 000008.11 | | | GTGTACC | | CATCGTGT | | | | |
| | | | | | | | | GCACCA | | ACCGCACC | | | | |
| | | | | | | | | | | ATGGAGA | | | | |
| MED30 | FOXP3 | FOXP3 low | 90390 | NM_ | NC_ | 1.18E+08 | sense | GGCCGCC | 640. | AGCAGGC | 708. | CGG | 1 | 0.5967 |
| | | | | 080651.3 | 000008.11 | | | CGGGAAG | | CGCCCGG | | | | |
| | | | | | | | | TCAACA | | GAAGTCA | | | | |
| | | | | | | | | | | ACACGGC | | | | |
| | | | | | | | | | | GT | | | | |
| FOXP1 | FOXP3 | FOXP3 low | 27086 | NM_ | NC_ | 71041428 | anti- | AGAGGAG | 641. | GTGCAGA | 709. | TGG | 11 | 0.6926 |
| | | | | 032682.5 | 000003.12 | | sense | GAGACAC | | GGAGGAG | | | | |
| | | | | | | | | ATGTCG | | ACACATGT | | | | |
| | | | | | | | | | | CGTGGTC | | | | |
| | | | | | | | | | | A | | | | |
| FOXP1 | FOXP3 | FOXP3 low | 27086 | NM_ | NC_ | 71015617 | anti- | CATACACC | 642. | CTTGCATA | 710. | AGG | 12 | 0.6547 |
| | | | | 032682.5 | 000003.12 | | sense | ATGTCCAT | | CACCATGT | | | | |
| | | | | | | | | AGAG | | CCATAGA | | | | |
| | | | | | | | | | | GAGGATG | | | | |
| FOXP1 | FOXP3 | FOXP3 low | 27086 | NM_ | NC_ | 71046982 | sense | GCCTTCTG | 643. | CAAGGCC | 711. | GGG | 10 | 0.5683 |
| | | | | 032682.5 | 000003.12 | | | ACAATTCA | | TTCTGACA | | | | |
| | | | | | | | | GCCC | | ATTCAGCC | | | | |
| | | | | | | | | | | CGGGCAG | | | | |
| FOXP1 | FOXP3 | FOXP3 low | 27086 | NM_ | NC_ | 70988031 | anti- | GTTCTGTA | 644. | TTGGGTTC | 712. | AGG | 14 | 0.5925 |
| | | | | 032682.5 | 000003.12 | | sense | GACTTCAC | | TGTAGACT | | | | |
| | | | | | | | | ATGC | | TCACATGC | | | | |
| | | | | | | | | | | AGGTGG | | | | |
| FOXP3 | FOXP3 | FOXP3 low | 50943 | NM_ | NC_ | 49254057 | sense | ACCCAGG | 645. | CCTCACCC | 713. | GGG | 9 | 0.6666 |
| | | | | 014009.3 | 000023.11 | | | CATCATCC | | AGGCATC | | | | |
| | | | | | | | | GACAA | | ATCCGACA | | | | |
| | | | | | | | | | | AGGGCTC | | | | |
| FOXP3 | FOXP3 | FOXP3 low | 50943 | NM_ | NC_ | 49257007 | sense | CCCACCCA | 646. | TGTCCCCA | 714. | TGG | 5 | 0.7429 |
| | | | | 001409.3 | 000023.11 | | | CAGGGAT | | CCCACAG | | | | |
| | | | | | | | | CAACG | | GGATCAA | | | | |
| | | | | | | | | | | CGTGGCC | | | | |
| | | | | | | | | | | A | | | | |
| FOXP3 | FOXP3 | FOXP3 low | 50943 | NM_ | NC_ | 49255795 | sense | CCTACTTA | 647. | TCTCCCTA | 715. | CGG | 7 | 0.6738 |
| | | | | 001409.3 | 000023.11 | | | GGCACTG | | CTTAGGCA | | | | |
| | | | | | | | | CCAGG | | CTGCCAG | | | | |
| | | | | | | | | | | GCGGACC | | | | |
| FOXP3 | FOXP3 | FOXP3 low | 50943 | NM_ | NC_ | 49257751 | anti- | GAGGGTG | 648. | CCCGGAG | 716. | GGG | 3 | 0.6447 |
| | | | | 014009.3 | 000023.11 | | sense | CCACCATG | | GGTGCCA | | | | |
| | | | | | | | | ACTAG | | CCATGACT | | | | |
| | | | | | | | | | | AGGGGCA | | | | |
| | | | | | | | | | | G | | | | |
| CBFB | FOXP3 | FOXP3 low | 865 | NM_ | NC_ | 67036720 | anti- | AAGTCGA | 649. | TTCTAAGT | 717. | AGG | 3 | 0.5993 |
| | | | | 001755.2 | 000016.10 | | sense | CATACTCT | | CGACATAC | | | | |
| | | | | | | | | CGGCT | | TCTCGGCT | | | | |
| | | | | | | | | | | AGGTGT | | | | |
| CBFB | FOXP3 | FOXP3 low | 865 | NM_ | NC_ | 67029479 | anti- | CCTGCCTC | 650. | CCCGCCTG | 718. | CGG | 1 | 0.6743 |
| | | | | 001755.2 | 600001.10 | | sense | ACCTCACA | | CCTCACCT | | | | |
| | | | | | | | | CTCG | | CACACTCG | | | | |
| | | | | | | | | | | CGGCTC | | | | |
| CBFB | FOXP3 | FOXP3 low | 865 | NM_ | NC_ | 167029807 | anti- | GCCGACTT | 651. | GCCAGCC | 719. | CGG | 2 | 0.7383 |
| | | | | 001755.2 | 000016.10 | | sense | ACGATTTC | | GACTTACG | | | | |
| | | | | | | | | CGAG | | ATTTCCGA | | | | |
| | | | | | | | | | | GCGGCCG | | | | |
| CBFB | FOXP3 | FOXP3 low | 865 | NM_ | NC_ | 67066729 | sense | GGAGTCT | 652. | GAATGGA | 720. | AGG | 4 | 0.5938 |
| | | | | 001755.2 | 000016.10 | | | GTGTTATC | | GTCTGTGT | | | | |
| | | | | | | | | TGGAA | | TATCTGGA | | | | |
| | | | | | | | | | | AAGGCTG | | | | |
| FOXO1 | FOXP3 | FOXP3 low | 2308 | NM_ | NC_ | 40665740 | anti- | ACAGGTT | 653. | TAGGACA | 721. | CGG | 1 | 0.547 |
| | | | | 002015.3 | 000013.11 | | sense | GCCCCAC | | GGTTGCCC | | | | |
| | | | | | | | | GCGTTG | | CACGCGTT | | | | |
| | | | | | | | | | | GCGGCGG | | | | |
| FOX01 | FOXP3 | FOXP3 low | 2308 | NM_ | NC_ | 40666107 | sense | GGAGTTT | 654. | GGCCGGA | 722. | CGG | 1 | 0.629 |
| | | | | 002015.3 | 000013.11 | | | AGCCAGT | | GTTTAGCC | | | | |
| | | | | | | | | CCAACT | | AGTCCAAC | | | | |
| | | | | | | | | | | TCGGCCA | | | | |
| FOX01 | FOXP3 | FOXP3 low | 2308 | NM_ | NC_ | 40560279 | anti- | GGTGGCG | 655. | GTTTGGTG | 723. | CGG | 2 | 0.6741 |
| | | | | 002015.3 | 000013.11 | | sense | CAAACGA | | GCGCAAA | | | | |
| | | | | | | | | GTAGCA | | CGAGTAG | | | | |
| | | | | | | | | | | CACGGCG | | | | |
| | | | | | | | | | | T | | | | |
| FOX01 | FOXP3 | FOXP3 low | 2308 | NM_ | NC_ | 40560544 | anti- | TAGCATTT | 656. | GTACTAGC | 724. | GGG | 2 | 0.6665 |
| | | | | 002015.3 | 000013.11 | | sense | GAGCTAG | | ATTTGAGC | | | | |
| | | | | | | | | TTCGA | | TAGTTCGA | | | | |
| | | | | | | | | | | GGGCGA | | | | |
| SS18 | FOXP3 | FOXP3 low | 6760 | NM_ | NC_ | 26052686 | sense | AATCAGAT | 657. | ACAGAAT | 725. | GGG | 5 | 0.6566 |
| | | | | 001007559.1 | 800001.10 | | | GACAATG | | CAGATGA | | | | |
| | | | | | | | | AGTCA | | CAATGAG | | | | |
| | | | | | | | | | | TCAGGGA | | | | |
| | | | | | | | | | | CA | | | | |
| SS18 | FOXP3 | FOXP3 low | 6760 | NM_ | NC_ | 26039408 | sense | CAATACAA | 658. | TCAGCAAT | 726. | AGG | 6 | 0.7278 |
| | | | | 001007559.1 | 000018.10 | | | TATGCCAC | | ACAATATG | | | | |
| | | | | | | | | AGGG | | CCACAGG | | | | |
| | | | | | | | | | | GAGGCGG | | | | |
| SS18 | FOXP3 | FOXP3 low | 6760 | NM_ | NC_ | 26052827 | sense | CCTAACCA | 659. | AGGGCCT | 727. | GGG | 5 | 0.6709 |
| | | | | 000107559.1 | 000018.10 | | | TATGCCTA | | AACCATAT | | | | |
| | | | | | | | | TGCA | | GCCTATGC | | | | |
| | | | | | | | | | | AGGGACC | | | | |
| SS18 | FOXP3 | FOXP3 low | 6760 | NM_ | NC_ | 26057677 | anti- | GGCATGTT | 660. | TGAAGGC | 728. | AGG | 4 | 0.7849 |
| | | | | 001007559.1 | 000018.10 | | sense | GTGAGAG | | ATGTTGTG | | | | |
| | | | | | | | | CGTGG | | AGAGCGT | | | | |
| | | | | | | | | | | GGAGGTG | | | | |
| | | | | | | | | | | G | | | | |
| MED14 | FOXP3 | FOXP3 low | 9282 | NM_ | NC_ | 40692233 | anti- | ATCACACA | 661. | TTGTATCA | 729. | GGG | 15 | 0.6711 |
| | | | | 004229.3 | 000023.11 | | sense | TAGCGAC | | CACATAGC | | | | |
| | | | | | | | | GAAGT | | GACGAAG | | | | |
| | | | | | | | | | | TGGGCTA | | | | |
| MED14 | FOXP3 | FOXP3 low | 9282 | NM_ | NC_ | 40714644 | anti- | CAGAGCA | 662. | GGACCAG | 730. | AGG | 4 | 0.6206 |
| | | | | 004229.3 | 000023.11 | | sense | TCTCTAGC | | AGCATCTC | | | | |
| | | | | | | | | TAACG | | TAGCTAAC | | | | |
| | | | | | | | | | | GAGGCCA | | | | |
| MED14 | FOXP3 | FOXP3 low | 9282 | NM_ | NC_ | 40682898 | anti- | CTAACTCT | 663. | AACACTAA | 731. | CGG | 17 | 0.7032 |
| | | | | 004229.3 | 000023.11 | | sense | GCTACCCA | | CTCTGCTA | | | | |
| | | | | | | | | AGTG | | CCCAAGT | | | | |
| | | | | | | | | | | GCGGTTA | | | | |
| MED14 | FOXP3 | FOXP3 low | 9282 | NM_ | NC_ | 40711237 | sense | TAATGTTA | 664. | ACTCTAAT | 732. | TGG | 8 | 0.6368 |
| | | | | 004229.3 | 000023.11 | | | ATCCGAG | | GTTAATCC | | | | |
| | | | | | | | | AACGG | | GAGAACG | | | | |
| | | | | | | | | | | GTGGGGA | | | | |
| DDX39B | FOXP3 | FOXP3 low | 7919 | NM_ | NC_ | 31540429 | sense | CCTGCCAA | 665. | GGCCCCT | 733. | GGG | 2 | 0.6194 |
| | | | | 080598.5 | 000006.12 | | | GAAGGAT | | GCCAAGA | | | | |
| | | | | | | | | GTCAA | | AGGATGT | | | | |
| | | | | | | | | | | CAAGGGC | | | | |
| | | | | | | | | | | TC | | | | |
| DDX39B | FOXP3 | FOXP3 low | 7919 | NM_ | NC_ | 31540352 | anti- | CTCAAAGC | 666. | GATGCTCA | 734. | TGG | 2 | 0.6078 |
| | | | | 080598.5 | 000006.12 | | sense | CACAGTC | | AAGCCAC | | | | |
| | | | | | | | | GACAA | | AGTCGAC | | | | |
| | | | | | | | | | | AATGGCC | | | | |
| | | | | | | | | | | C | | | | |
| DDX39B | FOXP3 | FOXP3 low | 7919 | NM_ | NC_ | 31536578 | anti- | GAGGCTC | 667. | GGTTGAG | 735. | GGG | 5 | 0.6386 |
| | | | | 080598.5 | 000006.12 | | sense | TTATTTCG | | GCTCTTAT | | | | |
| | | | | | | | | AGCCA | | TTCGAGCC | | | | |
| | | | | | | | | | | AGGGCTA | | | | |
| DDX39B | FOXP3 | FOXP3 low | 7919 | NM_ | NC_ | 31536505 | sense | GATAAGA | 668. | ATGTGATA | 736. | CGG | 5 | 0.7042 |
| | | | | 908058.5 | 000006.12 | | | TGCTTGÅA | | AGATGCTT | | | | |
| | | | | | | | | CAGCT | | GAACAGC | | | | |
| | | | | | | | | | | TCGGTGA | | | | |
| SOCS3 | FOXP | FOXP3 low | 9021 | NM_ | NC_ | 78358663 | sense | ACCTACTG | 669. | CGCCACCT | 737. | AGG | 2 | 0.6512 |
| | | | | 003955.4 | 000017.11 | | | AACCCTCC | | ACTGAACC | | | | |
| | | | | | | | | TCCG | | CTCCTCCG | | | | |
| | | | | | | | | | | AGGTGC | | | | |
| SOCS3 | FOXP3 | FOXP3 low | 9021 | NM_ | NC_ | 78358900 | anti- | GCGGATC | 670. | TGTCGCG | 738. | CGG | 2 | 0.6181 |
| | | | | 003955.4 | 000017.11 | | sense | AGAAAGG | | GATCAGA | | | | |
| | | | | | | | | TGCCGG | | AAGGTGC | | | | |
| | | | | | | | | | | CGGCGGG | | | | |
| | | | | | | | | | | CT | | | | |
| SOCS3 | FOXP3 | FOXP3 low | 9021 | NM_ | NC_ | 78358835 | sense | TCAGOGTC | 671. | ACGCTCA | 739. | GGG | 2 | 0.5946 |
| | | | | 003955.4 | 000017.11 | | | AAGACCC | | GCGTCAA | | | | |
| | | | | | | | | AGTCT | | GACCCAG | | | | |
| | | | | | | | | | | TCTGGGA | | | | |
| | | | | | | | | | | CC | | | | |
| SOCS3 | FOXP3 | FOXP3 low | 9021 | NM_ | NC_ | 78358748 | anti- | TTGAGCAC | 672. | CAGCTTGA | 740. | GGG | 2 | 0.5968 |
| | | | | 003955.4 | 000017.11 | | sense | GCAGTCG | | GCACGCA | | | | |
| | | | | | | | | AAGCG | | GTCGAAG | | | | |
| | | | | | | | | | | CGGGGCA | | | | |
| | | | | | | | | | | C | | | | |
| SP2 | FOXP3 | FOXP3 low | 6668 | NM_ | NC_ | 47922963 | anti- | AGGCGTG | 673. | CGGAAGG | 741. | GGG | 4 | 0.6481 |
| | | | | 003110.5 | 000017.11 | | sense | CGGATGT | | CGTGCGG | | | | |
| | | | | | | | | AGACCT | | ATGTAGA | | | | |
| | | | | | | | | | | CCTGGGA | | | | |
| | | | | | | | | | | GG | | | | |
| SP2 | FOXP3 | FOXP3 low | 6668 | NM_ | NC_ | 47916790 | anti- | CTTGTTAG | 674. | CTTTCTTG | 742. | GGG | 3 | 0.7011 |
| | | | | 003110.5 | 000017.11 | | sense | TCTTAGAC | | TTAGTCTT | | | | |
| | | | | | | | | AGCG | | AGACAGC | | | | |
| | | | | | | | | | | GGGGTTG | | | | |
| SP2 | FOXP3 | FOXP3 low | 6668 | NM_ | NC_ | 47916469 | sense | TGCCAATA | 675. | CAAATGCC | 743. | CGG | 3 | 0.7354 |
| | | | | 003110.5 | 000017.11 | | | TCCAGTAC | | AATATCCA | | | | |
| | | | | | | | | CAGG | | GTACCAG | | | | |
| | | | | | | | | | | GCGGTCC | | | | |
| SP2 | FOXP3 | FOXP3 low | 6668 | NM_ | NC_ | 47916267 | anti- | TTGATAG | 676. | AGGTTTG | 744. | CGG | 3 | 0.7038 |
| | | | | 003110.5 | 000017.11 | | sense | GGACAAG | | ATAGGGA | | | | |
| | | | | | | | | TTTCCG | | CAAGTTTC | | | | |
| | | | | | | | | | | CGCGGTG | | | | |
| | | | | | | | | | | T | | | | |
| STATSA | FOXP3 | FOXP3 low | 6776 | NM_ | NC_ | 42292035 | sense | ACATTCTG | 677. | CGGCACA | 745. | AGG | 5 | 0.7341 |
| | | | | 500312.3 | 000017.11 | | | TACAATGA | | TTCTGTAC | | | | |
| | | | | | | | | ACAG | | AATGAAC | | | | |
| | | | | | | | | | | AGAGGCT | | | | |
| | | | | | | | | | | G | | | | |
| STAT5A | FOXP3 | FOXP3 low | 6776 | NM_ | NC_ | 42304559 | sense | ATCAAGC | 678. | GAGGATC | 746. | GGG | 12 | 0.6531 |
| | | | | 003152.3 | 000017.11 | | | GTGCTGA | | AAGCGTG | | | | |
| | | | | | | | | CCGGCG | | CTGACCG | | | | |
| | | | | | | | | | | GCGGGGT | | | | |
| | | | | | | | | | | GC | | | | |
| STAT5A | FOXP3 | FOXP3 low | 6776 | NM_ | NC_ | 42305662 | sense | CAGCCAG | 679. | ACGGCAG | 747. | CGG | 13 | 0.6255 |
| | | | | 003152.3 | 000017.11 | | | GACCACA | | CCAGGAC | | | | |
| | | | | | | | | ATGCCA | | CACAATGC | | | | |
| | | | | | | | | | | CACGGCT | | | | |
| | | | | | | | | | | Å | | | | |
| STAT5A | FOXP3 | FOXP3 low | 6776 | NM_ | NC_ | 42301385 | sense | CGTGCAC | 680. | TGAACGT | 748. | AGG | 10 | 0.5812 |
| | | | | 003152.3 | 000017.11 | | | ATGAATCC | | GCACATG | | | | |
| | | | | | | | | CCCCC | | AATCCCCC | | | | |
| | | | | | | | | | | CCAGGTG | | | | |
| | | | | | | | | | | A | | | | |
| TAF5L | FOXP3 | FOXP3 low | 27097 | NM_ | NC_ | 2.3E+08 | anti- | CGGGACA | 681. | GATGCGG | 749. | GGG | 4 | 0.6222 |
| | | | | 014409.3 | 000001.11 | | sense | CGTCTACT | | GACACGT | | | | |
| | | | | | | | | TGGTG | | CTACTTGG | | | | |
| | | | | | | | | | | TGGGGCT | | | | |
| | | | | | | | | | | C | | | | |
| TAF5L | FOXP3 | FOXP3 low | 27097 | NM_ | NC_ | 2.3E+08 | sense | GCAGAAC | 682. | TTCTGCAG | 750. | AGG | 4 | 0.6216 |
| | | | | 014409.3 | 000001.11 | | | GAGGCTG | | AACGAGG | | | | |
| | | | | | | | | CCCTAG | | CTGCCCTA | | | | |
| | | | | | | | | | | GAGGTCT | | | | |
| TAF5L | FOXP3 | FOXP3 low | 27097 | NM_ | NC_ | 2.3E+08 | sense | GCGGACC | 683. | CACTGCG | 751. | AGG | 5 | 0.7066 |
| | | | | 014409.3 | 000001.11 | | | AGTGTAC | | GACCAGT | | | | |
| | | | | | | | | AGCACG | | GTACAGC | | | | |
| | | | | | | | | | | ACGAGGT | | | | |
| | | | | | | | | | | TC | | | | |
| TAF5L | FOXP3 | FOXP3 low | 27097 | NM_ | NC_ | 2.3E+08 | anti- | TAAGGTG | 684. | TATGTAAG | 752. | GGG | 4 | 0.6402 |
| | | | | 014409.3 | 000001.11 | | sense | AGGACTTT | | GTGAGGA | | | | |
| | | | | | | | | GCACA | | CTTTGCAC | | | | |
| | | | | | | | | | | AGGGCAG | | | | |
| SETDB1 | FOXP3 | FOXP3 low | 9869 | NM_ | NC_ | 1.51E+08 | sense | AAGGAAA | 685. | AACAAAG | 753. | GGG | 7 | 0.663 |
| | | | | 012432.3 | 000001.11 | | | GAGTCTAC | | GAAAGAG | | | | |
| | | | | | | | | TGTCG | | TCTACTGT | | | | |
| | | | | | | | | | | CGGGGAA | | | | |
| | | | | | | | | | | C | | | | |
| SETDB1 | FOXP3 | FOXP3 low | 9869 | NM_ | NC_ | 1.51E+08 | sense | AGATGTG | 686. | CAAAAGA | 754. | AGG | 10 | 0.6692 |
| | | | | 012432.3 | 000001.11 | | | AGTGGAT | | TGTGAGT | | | | |
| | | | | | | | | CTATCG | | GGATCTAT | | | | |
| | | | | | | | | | | CGAGGCT | | | | |
| | | | | | | | | | | C | | | | |
| SETDB1 | FOXP3 | FOXP3 low | 9869 | NM_ | NC_ | 1.51E+08 | anti- | CCTTACCT | 687. | CATCCCTT | 755. | AGG | 3 | 0.723 |
| | | | | 012432.3 | 000001.11 | | sense | GAATCAAT | | ACCTGAAT | | | | |
| | | | | | | | | ACTG | | CAATACTG | | | | |
| | | | | | | | | | | AGGACA | | | | |
| SETDB1 | FOXP3 | FOXP3 low | 9869 | NM_ | NC_ | 1.51E+08 | sense | GTTATCTA | 688. | TCATGTTA | 756. | TGG | 13 | 0.6888 |
| | | | | 012432.3 | 000001.11 | | | TAAGACA | | TCTATAAG | | | | |
| | | | | | | | | CCTTG | | ACACCTTG | | | | |
| | | | | | | | | | | TGGTCT | | | | |
| RNF20 | FOXP3 | FOXP3 low | 56254 | NM_ | NC_ | 1.02E+08 | sense | ACTTCGGC | 689. | AGAAACTT | 757. | AGG | 9 | 0.6981 |
| | | | | 019592.6 | 000009.12 | | | AAGACTTT | | CGGCAAG | | | | |
| | | | | | | | | GAGG | | ACTTTGAG | | | | |
| | | | | | | | | | | GAGGTCA | | | | |
| RNF20 | FOXP3 | FOXP3 low | 56254 | NM_ | NC_ | 1.02E+08 | sense | GCATCGC | 690. | AAAAGCA | 758. | AGG | 6 | 0.6768 |
| | | | | 019592.6 | 000009.12 | | | ACCATGTC | | TCGCACCA | | | | |
| | | | | | | | | TCAGG | | TGTCTCAG | | | | |
| | | | | | | | | | | GAGGTAC | | | | |
| RNF20 | FOXP3 | FOXP3 low | 56254 | NM_ | NC_ | 1.02E+08 | anti- | GGAGGGC | 691 | TGCAGGA | 759. | AGG | 13 | 0.6635 |
| | | | | 019592.6 | 000009.12 | | sense | ACTACCAC | | GGGCACT | | | | |
| | | | | | | | | TACGC | | ACCACTAC | | | | |
| | | | | | | | | | | GCAGGCG | | | | |
| | | | | | | | | | | T | | | | |
| RNF20 | FOXP3 | FOXP3 low | 56254 | NM_ | NC_ | 1.02E+08 | anti- | TCGGTTGA | 692. | AGTATCG | 760. | AGG | 3 | 0.658 |
| | | | | 019592.6 | 000009.12 | | sense | CAATCAAT | | GTTGACA | | | | |
| | | | | | | | | AGTG | | ATCAATAG | | | | |
| | | | | | | | | | | TGAGGCA | | | | |
| | | | | | | | | | | T | | | | |

TABLE 5
Nuclear factors that can be inhibited to increase IL-2 expression or overexpressed to decrease IL-2 expression

| | | | | | | Position | | | | | | | | |
|---|---|---|---|---|---|---|---|---|---|---|---|---|---|---|
| | | | | | | of Base | | sgRNA | SEQ | Target | SEQ | | | Rule |
| gene_ | screen_ | screen_ | Target | Target | Genomic | After Cut | | Target | ID | Context | ID | PAM | Exon | Set 2 |
| id | target | direction | Gene ID | Transcript | Sequence | (1-based) | Strand | Sequence | NO: | Sequence | NO: | Sequence | Number | score |
| TBX21 | IL2 | IL2 high | 30009 | NM_ | NC_ | 47744217 | anti- | CCGGGGC | 761. | GCAGCCG | 837. | GGG | 4 | 0.6246 |
| | | | | 013351.1 | 000017.11 | | sense | TGGTACTT | | GGGCTGG | | | | |
| | | | | | | | | ATGGA | | TACTTATG | | | | |
| | | | | | | | | | | GAGGGAC | | | | |
| | | | | | | | | | | T | | | | |
| TBX21 | IL2 | IL2 high | 30009 | NM_ | NC_00001 | 47733630 | sense | CCTGGGG | 762. | GCAGCCTG | 838. | GGG | 1 | 0.6294 |
| | | | | 013351.1 | 7.11 | | | TCTCCCTA | | GGGTCTCC | | | | |
| | | | | | | | | CCCGG | | CTACCCGG | | | | |
| | | | | | | | | | | GGGGCG | | | | |
| TBX21 | IL2 | IL2 high | 30009 | NM_ | NC_00001 | 47742726 | sense | GCGGTACC | 763. | ACTGGCG | 839. | GGG | 2 | 0.6321 |
| | | | | 013351.1 | 7.11 | | | AGAGCGG | | GTACCAGA | | | | |
| | | | | | | | | CAAGT | | GCGGCAA | | | | |
| | | | | | | | | | | GTGGGTG | | | | |
| | | | | | | | | | | C | | | | |
| TBX21 | IL2 | IL2 high | 30009 | NM_ | NC_ | 47733889 | anti- | TAAACTTG | 764. | TGATTAAA | 840. | TGG | 1 | 0.6344 |
| | | | | 013351.1 | 000017.11 | | sense | GACCACAA | | CTTGGACC | | | | |
| | | | | | | | | CAGG | | ACAACAG | | | | |
| | | | | | | | | | | GTGGTTG | | | | |
| ARID3A | IL2 | IL2 high | 1820 | NM_ | NC_ | 929887 | anti- | AACTCACA | 765. | CCCCAACT | 841. | AGG | 2 | 0.5991 |
| | | | | 005224.2 | 000019.10 | | sense | TGTCCTCG | | CACATGTC | | | | |
| | | | | | | | | TCGG | | CTCGTCGG | | | | |
| | | | | | | | | | | AGGCCA | | | | |
| ARID3A | IL2 | IL2 high | 1820 | NM_ | NC_ | 960105 | sense | ACAGCTCT | 766. | CCTCACAG | 842. | GGG | 4 | 0.7347 |
| | | | | 005224.2 | 000019.10 | | | ACGAACTC | | CTCTACGA | | | | |
| | | | | | | | | GACG | | ACTCGACG | | | | |
| | | | | | | | | | | GGGACC | | | | |
| ARID3A | IL2 | IL2 high | 1820 | NM_ | NC_ | 964923 | sense | ATAGACA | 767. | AGCCATAG | 843. | GGG | 6 | 0.6087 |
| | | | | 005224.2 | 000019.10 | | | GCAACCG | | ACAGCAAC | | | | |
| | | | | | | | | ACGGGA | | CGACGGG | | | | |
| | | | | | | | | | | AGGGCCG | | | | |
| ARID3A | IL2 | IL2 high | 1820 | NM_ | NC_ | 964374 | sense | GCTGTGG | 768. | AGAAGCT | 844. | AGG | 5 | 0.776 |
| | | | | 005224.2 | 000019.10 | | | CGTGAGAT | | GTGGCGT | | | | |
| | | | | | | | | CACCA | | GAGATCAC | | | | |
| | | | | | | | | | | CAAGGGC | | | | |
| | | | | | | | | | | C | | | | |
| GMEB1 | IL2 | IL2 high | 10691 | NM_ | NC_ | 28693028 | sense | AAGAGAG | 769. | CTGGAAG | 845. | TGG | 5 | 0.6435 |
| | | | | 006582.3 | 000001.11 | | | CTATTCGT | | AGAGCTAT | | | | |
| | | | | | | | | CTGGG | | TCGTCTGG | | | | |
| | | | | | | | | | | GTGGGAT | | | | |
| GMEB1 | IL2 | IL2 high | 10691 | NM_ | NC_ | 28690130 | sense | AGCTGGG | 770. | ATGAAGCT | 846. | CGG | 3 | 0.6723 |
| | | | | 006582.3 | 000001.11 | | | TCGGAGA | | GGGTCGG | | | | |
| | | | | | | | | ACAACA | | AGAACAA | | | | |
| | | | | | | | | | | CACGGCA | | | | |
| | | | | | | | | | | G | | | | |
| GMEB1 | IL2 | IL2 high | 10691 | NM_ | NC_ | 28697055 | sense | GCCAGGA | 771. | CAGTGCCA | 847. | TGG | 6 | 0.6728 |
| | | | | 006582.3 | 100000.11 | | | CAGCAGA | | GGACAGC | | | | |
| | | | | | | | | CAAGTG | | AGACAAG | | | | |
| | | | | | | | | | | TGTGGTGC | | | | |
| GMEB1 | IL2 | IL2 high | 10691 | NM_ | NC_ | 28691639 | sense | TGCTTACC | 772. | AAATTGCT | 848. | GGG | 4 | 0.6198 |
| | | | | 006582.3 | 000001.11 | | | CCATAACT | | TACCCCAT | | | | |
| | | | | | | | | TGTG | | AACTTGTG | | | | |
| | | | | | | | | | | GGGAGA | | | | |
| TP53 | IL2 | IL2 high | 7157 | NM_ | NC_ | 7676227 | anti- | CCATTGTT | 773. | TGAACCAT | 849. | GGG | 4 | 0.6899 |
| | | | | 600054.5 | 000017.11 | | sense | CAATATCG | | TGTTCAAT | | | | |
| | | | | | | | | TCCG | | ATCGTCCG | | | | |
| | | | | | | | | | | GGGACA | | | | |
| TP53 | IL2 | IL2 high | 7157 | NM_ | NC_ | 7675058 | sense | GAGCGCT | 774. | CCATGAGC | 850. | TGG | 5 | 0.6542 |
| | | | | 000546.5 | 000017.11 | | | GCTCAGAT | | GCTGCTCA | | | | |
| | | | | | | | | AGCGA | | GATAGCG | | | | |
| | | | | | | | | | | ATGGTGA | | | | |
| TP53 | IL2 | IL2 high | 7157 | NM_ | NC_ | 7676527 | anti- | GATCCACT | 775. | AATGGATC | 851. | AGG | 2 | 0.6108 |
| | | | | 000546.5 | 000017.11 | | sense | CACAGTTT | | CACTCACA | | | | |
| | | | | | | | | CCAT | | GTTTCCAT | | | | |
| | | | | | | | | | | AGGTCT | | | | |
| TP53 | IL2 | IL2 high | 7157 | NM_ | NC_ | 7674864 | sense | GGTGCCCT | 776. | TGGTGGT | 852. | AGG | 6 | 0.6259 |
| | | | | 600054.5 | 000017.11 | | | ATGAGCC | | GCCCTATG | | | | |
| | | | | | | | | GCCTG | | AGCCGCCT | | | | |
| | | | | | | | | | | GAGGTCT | | | | |
| CREB1 | IL2 | IL2 high | 1385 | NM_ | NC_ | 2.08E+08 | anti- | AGCTGTAC | 777. | GGGCAGC | 853. | GGG | 3 | 0.6415 |
| | | | | 004379.3 | 000002.12 | | sense | TAGAGTTA | | TGTACTAG | | | | |
| | | | | | | | | CGGT | | AGTTACGG | | | | |
| | | | | | | | | | | TGGGAGC | | | | |
| CREB1 | IL2 | IL2 high | 1385 | NM_ | NC_ | 2.08E+08 | sense | GGCTAACA | 778. | AGCTGGCT | 854. | GGG | 6 | 0.7053 |
| | | | | 004379.3 | 000002.12 | | | ATGGTACC | | AACAATG | | | | |
| | | | | | | | | GATG | | GTACCGAT | | | | |
| | | | | | | | | | | GGGGTAC | | | | |
| CREB1 | IL2 | IL2 high | 1385 | NM_ | NC_ | 2.08E+08 | anti- | TGGAGTT | 779. | AAATTGGA | 855. | TGG | 5 | 0.6189 |
| | | | | 004379.3 | 000002.12 | | sense | GGCACCGT | | GTTGGCAC | | | | |
| | | | | | | | | TACAG | | CGTTACAG | | | | |
| | | | | | | | | | | TGGTGA | | | | |
| CREB1 | IL2 | IL2 high | 1385 | NM_ | NC_ | 2.08E+08 | anti- | TGTGGAG | 780. | GACTTGTG | 856. | TGG | 3 | 0.6776 |
| | | | | 004379.3 | 000002.12 | | sense | ACTGAATA | | GAGACTG | | | | |
| | | | | | | | | ACTGA | | AATAACTG | | | | |
| | | | | | | | | | | ATGGCTG | | | | |
| KLF13 | IL2 | IL2 high | 51621 | NM_ | NC_ | 31327702 | sense | CCGACCTC | 781. | CGCGCCG | 857. | AGG | 1 | 0.7221 |
| | | | | 015995.3 | 000015.10 | | | GAGTCCCC | | ACCTCGAG | | | | |
| | | | | | | | | GCAG | | TCCCCGCA | | | | |
| | | | | | | | | | | GAGGAAG | | | | |
| KLF13 | IL2 | IL2 high | 51621 | NM_ | NC_ | 31327415 | sense | CGTGGTG | 782. | TCTTCGTG | 858. | CGG | 1 | 0.6798 |
| | | | | 015995.3 | 000015.10 | | | GCGCGGA | | GTGGCGC | | | | |
| | | | | | | | | TCCTAG | | GGATCCTA | | | | |
| | | | | | | | | | | GCGGACC | | | | |
| KLF13 | IL2 | IL2 high | 51621 | NM_ | NC_ | 31327274 | sense | CGTGTCCA | 783. | GCCTCGTG | 859. | CGG | 1 | 0.7 |
| | | | | 015995.3 | 000015.10 | | | TGTCGAGC | | TCCATGTC | | | | |
| | | | | | | | | CGCG | | GAGCCGC | | | | |
| | | | | | | | | | | GCGGTCG | | | | |
| KLF13 | IL2 | IL2 high | 51621 | NM_ | NC_ | 31327767 | anti- | GAGTTCTC | 784. | GTGTGAG | 860. | AGG | 1 | 0.592 |
| | | | | 015995.3 | 000015.10 | | sense | AGGTGCG | | TTCTCAGG | | | | |
| | | | | | | | | CCTTG | | TGCGCCTT | | | | |
| | | | | | | | | | | GAGGTGC | | | | |
| TAF5L | IL2 | IL2 high | 27097 | NM_ | NC_ | 2.3E+08 | anti- | CGGGACA | 785. | GATGCGG | 861. | GGG | 4 | 0.6222 |
| | | | | 014409.3 | 000001.11 | | sense | CGTCTACT | | GACACGTC | | | | |
| | | | | | | | | TGGTG | | TÅCTTGGT | | | | |
| | | | | | | | | | | GGGGCTC | | | | |
| TAF5L | IL2 | IL2 high | 27097 | NM_ | NC_ | 2.3E+08 | sense | GCAGAAC | 786. | TTCTGCAG | 862. | AGG | 4 | 0.6216 |
| | | | | 014409.3 | 000001.11 | | | GAGGCTG | | AACGAGG | | | | |
| | | | | | | | | CCCTAG | | CTGCCCTA | | | | |
| | | | | | | | | | | GAGGTCT | | | | |
| TAF5L | IL2 | IL2 high | 27097 | NM_ | NC_ | 2.3E+08 | sense | GCGGACC | 787. | CACTGCGG | 863. | AGG | 5 | 0.7066 |
| | | | | 014409.3 | 000001.11 | | | AGTGTACA | | ACCAGTGT | | | | |
| | | | | | | | | GCACG | | ACAGCAC | | | | |
| | | | | | | | | | | GAGGTTC | | | | |
| TAF5L | IL2 | IL2 high | 27097 | NM_ | NC_ | 2.3E+08 | anti- | TAAGGTG | 788. | TATGTAAG | 864. | GGG | 4 | 0.6402 |
| | | | | 014409.3 | 000001.11 | | sense | AGGACTTT | | GTGAGGA | | | | |
| | | | | | | | | GCACA | | CTTTGCAC | | | | |
| | | | | | | | | | | AGGGCAG | | | | |
| ZBTB43 | IL2 | IL2 high | 23099 | NM_ | NC_ | 1.27E+08 | anti- | AGTACCTG | 789. | CAGGAGT | 865. | GGG | 3 | 0.6089 |
| | | | | 014007.3 | 000009.12 | | sense | GTCACAAA | | ACCTGGTC | | | | |
| | | | | | | | | AGTA | | ACAAAAGT | | | | |
| | | | | | | | | | | AGGGTGA | | | | |
| ZBTB43 | IL2 | IL2 high | 23099 | NM_ | NC_ | 1.27E+08 | sense | CTTCCTCC | 790. | CAAGCTTC | 866. | TGG | 3 | 0.6684 |
| | | | | 014007.3 | 000009.12 | | | AGATGTG | | CTCCAGAT | | | | |
| | | | | | | | | GCATG | | GTGGCAT | | | | |
| | | | | | | | | | | GTGGTAG | | | | |
| ZBTB43 | IL2 | IL2 high | 23099 | NM_ | NC_ | 1.27E+08 | sense | GCGCCGA | 791. | GACAGCG | 867. | CGG | 3 | 0.6365 |
| | | | | 014007.3 | 000009.12 | | | GTTCCACT | | CCGAGTTC | | | | |
| | | | | | | | | ACACC | | CACTACAC | | | | |
| | | | | | | | | | | CCGGCCC | | | | |
| ZBTB43 | IL2 | IL2 high | 23099 | NM_ | NC_ | 1.27E+08 | anti- | GCTGGGC | 792. | AGTTGCTG | 868. | CGG | 3 | 0.5735 |
| | | | | 014007.3 | 000009.12 | | sense | AGGTATTC | | GGCAGGT | | | | |
| | | | | | | | | GTGCT | | ATTCGTGC | | | | |
| | | | | | | | | | | TCGGTGA | | | | |
| RNF20 | IL2 | IL2 high | 56254 | NM_ | NC_ | 1.02E+08 | sense | ACTTCGGC | 793. | AGAAACTT | 869. | AGG | 9 | 0.6981 |
| | | | | 019592.6 | 000009.12 | | | AAGACTTT | | CGGCAAG | | | | |
| | | | | | | | | GAGG | | ACTTTGAG | | | | |
| | | | | | | | | | | GAGGTCA | | | | |
| RNF20 | IL2 | IL2 high | 56254 | NM_ | NC_ | 1.02E+08 | sense | GCATCGCA | 794. | AAAAGCAT | 870. | AGG | 6 | 0.6768 |
| | | | | 019592.6 | 000009.12 | | | CCATGTCT | | CGCACCAT | | | | |
| | | | | | | | | CAGG | | GTCTCAGG | | | | |
| | | | | | | | | | | AGGTAC | | | | |
| RNF20 | IL2 | IL2 high | 56254 | NM_ | NC_ | 1.02E+08 | anti- | GGAGGGC | 795. | TGCAGGA | 871. | AGG | 13 | 0.6635 |
| | | | | 019592.6 | 000009.12 | | sense | ACTACCAC | | GGGCACT | | | | |
| | | | | | | | | TACGC | | ACCACTAC | | | | |
| | | | | | | | | | | GCAGGCG | | | | |
| | | | | | | | | | | T | | | | |
| RNF20 | IL2 | IL2 high | 56254 | NM_ | NC | 1.02E+08 | anti- | TCGGTTGA | 796. | AGTATCGG | 872. | AGG | 3 | 0.658 |
| | | | | 019592.6 | 000009.12 | | sense | CAATCAAT | | TTGACAAT | | | | |
| | | | | | | | | AGTG | | CAATAGTG | | | | |
| | | | | | | | | | | AGGCAT | | | | |
| TFDP1 | IL2 | IL2 high | 7027 | NM_ | NC_ | 1.14E+08 | sense | ACCGGCA | 797. | AGAGACC | 873. | TGG | 5 | 0.6315 |
| | | | | 007111.4 | 000013.11 | | | GCGTCAAA | | GGCAGCG | | | | |
| | | | | | | | | CACCC | | TCAAACAC | | | | |
| | | | | | | | | | | CCTGGTG | | | | |
| | | | | | | | | | | G | | | | |
| TFDP1 | IL2 | IL2 high | 7027 | NM_ | NC_ | 1.14E+08 | sense | ATGACCAG | 798. | GCTTATGA | 874. | CGG | 7 | 0.6204 |
| | | | | 007111.4 | 000013.11 | | | AAAAACAT | | CCAGAAA | | | | |
| | | | | | | | | AAGA | | AACATAAG | | | | |
| | | | | | | | | | | ACGGCGC | | | | |
| TFDP1 | IL2 | IL2 high | 7027 | NM_ | NC_ | 1.14E+08 | anti- | CCTTCATG | 799. | CAGACCTT | 875. | AGG | 6 | 0.6851 |
| | | | | 007111.4 | 000013.11 | | sense | GAGAAAT | | CATGGAG | | | | |
| | | | | | | | | GCCGT | | AAATGCCG | | | | |
| | | | | | | | | | | TAGGCCC | | | | |
| TFDP1 | IL2 | IL2 high | 7027 | NM_ | NC_ | 1.14E+08 | sense | GGTGCAG | 800. | ACCTGGTG | 876. | CGG | 9 | 0.6402 |
| | | | | 007111.4 | 000013.11 | | | AGAAACC | | CAGAGAA | | | | |
| | | | | | | | | GGCATG | | ACCGGCAT | | | | |
| | | | | | | | | | | GCGGAGC | | | | |
| RFX7 | IL2 | IL2 high | 64864 | NM_ | NC_ | 56098123 | anti- | ACAACGAT | 801. | TGCCACAA | 877. | AGG | 8 | 0.6173 |
| | | | | 022841.5 | 000015.10 | | sense | ACCAATAG | | CGATACCA | | | | |
| | | | | | | | | GTTG | | ATAGGTTG | | | | |
| | | | | | | | | | | AGGAGA | | | | |
| RFX7 | IL2 | IL2 high | 64864 | NM_ | NC_ | 56095516 | anti- | AGCTGAAT | 802. | CCAAAGCT | 878. | GGG | 9 | 0.6523 |
| | | | | 022841.5 | 000015.10 | | sense | CACTGATA | | GAATCACT | | | | |
| | | | | | | | | ACAA | | GATAACAA | | | | |
| | | | | | | | | | | GGGCAG | | | | |
| RFX7 | IL2 | IL2 high | 64864 | NM_ | NC_ | 56142833 | sense | CTGGATTC | 803. | TTTCCTGG | 879. | AGG | 4 | 0.6867 |
| | | | | 022841.5 | 000015.10 | | | GGAATACC | | ATTCGGAA | | | | |
| | | | | | | | | CTAG | | TACCCTAG | | | | |
| | | | | | | | | | | AGGAAC | | | | |
| RFX7 | IL2 | IL2 high | 64864 | NM_ | NC_ | 56101446 | anti- | GAAGCGG | 804. | CAAGGAA | 880. | CGG | 7 | 0.6903 |
| | | | | 022841.5 | 000015.10 | | sense | GCTAATTC | | GCGGGCT | | | | |
| | | | | | | | | CAAGA | | AATTCCAA | | | | |
| | | | | | | | | | | GACGGTG | | | | |
| | | | | | | | | | | T | | | | |
| RUNX3 | IL2 | IL2 high | 864 | NM_ | NC_ | 24927597 | anti- | CACTGCGG | 805. | CGCCCACT | 881. | AGG | 2 | 0.6012 |
| | | | | 004350.2 | 000001.11 | | sense | CCCACGAA | | GCGGCCC | | | | |
| | | | | | | | | GCGA | | ACGAAGC | | | | |
| | | | | | | | | | | GAAGGTC | | | | |
| | | | | | | | | | | G | | | | |
| RUNX3 | IL2 | IL2 high | 864 | NM_ | NC_ | 24902559 | sense | CCCCAGGA | 806. | CAGACCCC | 882. | GGG | 5 | 0.642 |
| | | | | 004350.2 | 000001.11 | | | TGCATTAT | | AGGATGC | | | | |
| | | | | | | | | CCCG | | ATTATCCC | | | | |
| | | | | | | | | | | GGGGCCA | | | | |
| RUNX3 | IL2 | IL2 high | 864 | NM_ | NC_ | 24907265 | anti- | CCGTGCCG | 807 | CCCTCCGT | 883. | GGG | 4 | 0.6118 |
| | | | | 004350.2 | 000001.11 | | sense | TACCTTGG | | GCCGTACC | | | | |
| | | | | | | | | ATTG | | TTGGATTG | | | | |
| | | | | | | | | | | GGGTCT | | | | |
| RUNX3 | IL2 | IL2 high | 864 | NM_ | NC_ | 24919297 | anti- | TCGGTGGT | 808. | TGGCTCG | 884. | GGG | 3 | 0.5939 |
| | | | | 004350.2 | 000001.11 | | sense | AGGTCGCC | | GTGGTAG | | | | |
| | | | | | | | | ACTT | | GTCGCCAC | | | | |
| | | | | | | | | | | TTGGGTG | | | | |
| | | | | | | | | | | G | | | | |
| CXXC1 | IL2 | IL2 high | 30827 | NM_ | NC_ | 50285885 | sense | AAACGGTC | 809 | GATCAAAC | 885. | TGG | 5 | 0.6028 |
| | | | | 014593.3 | 000018.10 | | | AGCCCGCA | | GGTCAGCC | | | | |
| | | | | | | | | TGTG | | CGCATGTG | | | | |
| | | | | | | | | | | TGGTGA | | | | |
| CXXC1 | IL2 | IL2 high | 30827 | NM_ | NC_ | 50284548 | sense | AGAAGGA | 810. | CAACAGA | 886. | CGG | 9 | 0.6935 |
| | | | | 014593.3 | 000018.10 | | | GGAGCGA | | AGGAGGA | | | | |
| | | | | | | | | TACAAG | | GCGATACA | | | | |
| | | | | | | | | | | AGCGGCA | | | | |
| | | | | | | | | | | T | | | | |
| CXXC1 | IL2 | IL2 high | 30827 | NM_ | NC_ | 50285170 | anti- | ATGCGCCC | 811. | ACGGATG | 887. | TGG | 7 | 0.5917 |
| | | | | 014593.3 | 000018.10 | | sense | TAACTTCT | | CGCCCTAA | | | | |
| | | | | | | | | GTGA | | CTTCTGTG | | | | |
| | | | | | | | | | | ATGGCTG | | | | |
| CXXC1 | IL2 | IL2 high | 30827 | NM_ | NC_ | 50286232 | sense | CCAAGCTA | 812. | GACCCCAA | 888. | CGG | 4 | 0.6313 |
| | | | | 014593.3 | 000018.10 | | | GAGATTCG | | GCTAGAG | | | | |
| | | | | | | | | CTAT | | ATTCGCTA | | | | |
| | | | | | | | | | | TCGGCAC | | | | |
| IKZF3 | IL2 | IL2 high | 22806 | NM_ | NC_ | 39792732 | sense | AAGATGA | 813. | TGGAAAG | 889. | TGG | 4 | 0.7182 |
| | | | | 012481.4 | 000017.11 | | | ACTGCGAT | | ATGAACTG | | | | |
| | | | | | | | | GTGTG | | CGATGTGT | | | | |
| | | | | | | | | | | GTGGATT | | | | |
| IKZF3 | IL2 | IL2 high | 22806 | NM_ | NC_ | 39788318 | sense | CAAGCAG | 814. | GTTACAAG | 890. | AGG | 6 | 0.6635 |
| | | | | 012481.4 | 000017.11 | | | AGAAGTTC | | CAGAGAA | | | | |
| | | | | | | | | CCTTG | | GTTCCCTT | | | | |
| | | | | | | | | | | GAGGAGC | | | | |
| IKZF3 | IL2 | IL2 high | 22806 | NM_ | NC_ | 39766413 | sense | GCTCATAC | 815. | GTGAGCTC | 891 | TGG | 8 | 0.6101 |
| | | | | 012481.4 | 000017.11 | | | AGACCCGC | | ATACAGAC | | | | |
| | | | | | | | | ATGA | | CCGCATGA | | | | |
| | | | | | | | | | | TGGACC | | | | |
| IKZF3 | IL2 | IL2 high | 22806 | NM_ | NC_ | 39777693 | sense | GGACAGA | 816. | TACTGGAC | 892. | TGG | 7 | 0.7336 |
| | | | | 012481.4 | 000017.11 | | | TTAGCAAG | | AGATTAGC | | | | |
| | | | | | | | | CAATG | | AAGCAAT | | | | |
| | | | | | | | | | | GTGGCAA | | | | |
| PRDM1 | IL2 | IL2 high | 639 | NM_ | NC_ | 1.06E+08 | sense | AGGATGC | 817. | ATGGAGG | 893. | TGG | 2 | 0.7731 |
| | | | | 001198.3 | 000006.12 | | | GGATATG | | ATGCGGAT | | | | |
| | | | | | | | | ACTCTG | | ATGACTCT | | | | |
| | | | | | | | | | | GTGGACA | | | | |
| PRDM1 | IL2 | IL2 high | 639 | NM_ | NC_ | 1.06E+08 | anti- | GGACGCG | 818. | CGTAGGA | 894. | AGG | 5 | 0.6665 |
| | | | | 001198.3 | 000006.12 | | sense | TTCAAGTA | | CGCGTTCA | | | | |
| | | | | | | | | AGCGT | | AGTAAGC | | | | |
| | | | | | | | | | | GTAGGAG | | | | |
| | | | | | | | | | | T | | | | |
| PRDM1 | IL2 | IL2 high | 639 | NM_ | NC_ | 1.06E+08 | anti- | GGGGAGC | 819. | AATGGGG | 895. | GGG | 5 | 0.6871 |
| | | | | 001198.3 | 000006.12 | | sense | GAGTGAT | | GAGCGAG | | | | |
| | | | | | | | | GTACGT | | TGATGTAC | | | | |
| | | | | | | | | | | GTGGGTCT | | | | |
| PRDM1 | IL2 | IL2 high | 639 | NM_ | NC_ | 1.06E+08 | sense | TTTGGACA | 820. | CTCTTTTG | 896. | AGG | 4 | 0.6708 |
| | | | | 001198.3 | 000006.12 | | | GATCTATT | | GACAGATC | | | | |
| | | | | | | | | CCAG | | TATTCCAG | | | | |
| | | | | | | | | | | AGGGGA | | | | |
| IKZF1 | IL2 | IL2 high | 10320 | NM_ | NC 00000 | 50376659 | sense | GAAAATG | 821. | GAGAGAA | 897. | GGG | 4 | 0.66 |
| | | | | 006060.5 | 7.14 | | | AATGGCTC | | AATGAATG | | | | |
| | | | | | | | | CCACA | | GCTCCCAC | | | | |
| | | | | | | | | | | AGGGACC | | | | |
| IKZF1 | IL2 | IL2 high | 10320 | NM_ | NC_ | 50399996 | anti- | GATGGCTT | 822. | TGTTGATG | 898. | GGG | 8 | 0.7379 |
| | | | | 006060.5 | 000007.14 | | sense | GGTCCATC | | GCTTGGTC | | | | |
| | | | | | | | | ACGT | | CATCACGT | | | | |
| | | | | | | | | | | GGGACT | | | | |
| IKZF1 | IL2 | IL2 high | 10320 | NM_ | NC_ | 50382586 | sense | GGGGCCT | 823. | GTGCGGG | 899. | GGG | 5 | 0.6196 |
| | | | | 006060.5 | 000007.14 | | | CATTCACC | | GCCTCATT | | | | |
| | | | | | | | | CAGAA | | CACCCAGA | | | | |
| | | | | | | | | | | AGGGCAA | | | | |
| IKZF1 | IL2 | IL2 high | 10320 | NM _ | NC_ | 50327753 | sense | TCCAAGAG | 824. | AAGCTCCA | 900. | GGG | 3 | 0.617 |
| | | | | 006060.5 | 000007.14 | | | TGACAGA | | AGAGTGA | | | | |
| | | | | | | | | GTCGT | | CAGAGTC | | | | |
| | | | | | | | | | | GTGGGTA | | | | |
| | | | | | | | | | | A | | | | |
| FOXP1 | IL2 | IL2 high | 27086 | NM_ | NC_ | 71041428 | anti- | AGAGGAG | 825. | GTGCAGA | 901. | TGG | 11 | 0.6926 |
| | | | | 032682.5 | 000003.12 | | sense | GAGACAC | | GGAGGAG | | | | |
| | | | | | | | | ATGTCG | | ACACATGT | | | | |
| | | | | | | | | | | CGTGGTCA | | | | |
| FOXP1 | IL2 | IL2 high | 27086 | NM_ | NC_ | 71015617 | anti- | CATACACC | 826. | CTTGCATA | 902. | AGG | 12 | 0.6547 |
| | | | | 032682.5 | 000003.12 | | sense | ATGTCCAT | | CACCATGT | | | | |
| | | | | | | | | AGAG | | CCATAGAG | | | | |
| | | | | | | | | | | AGGATG | | | | |
| FOXP1 | IL2 | IL2 high | 27086 | NM_ | NC_ | 71046982 | sense | GCCTTCTG | 827. | CAAGGCCT | 903. | GGG | 10 | 0.5683 |
| | | | | 032682.5 | 000003.12 | | | ACAATTCA | | TCTGACAA | | | | |
| | | | | | | | | GCCC | | TTCAGCCC | | | | |
| | | | | | | | | | | GGGCAG | | | | |
| FOXP1 | IL2 | IL2 high | 27086 | NM_ | NC_ | 70988031 | anti- | GTTCTGTA | 828 | TTGGGTTC | 904. | AGG | 14 | 0.5925 |
| | | | | 032682.5 | 000003.12 | | sense | GACTTCAC | | TGTAGACT | | | | |
| | | | | | | | | ATGC | | TCACATGC | | | | |
| | | | | | | | | | | AGGTGG | | | | |
| PTEN | IL2 | IL2 high | 5728 | NM_ | NC_ | 87961027 | sense | AGAGCGT | 829. | GTATAGA | 905. | AGG | 8 | 0.7179 |
| | | | | 001304718. | 000010.11 | | | GCAGATA | | GCGTGCA | | | | |
| | | | | 1 | | | | ATGACA | | GATAATGA | | | | |
| | | | | | | | | | | CAAGGAA | | | | |
| | | | | | | | | | | T | | | | |
| PTEN | IL2 | IL2 high | 5728 | NM_ | NC_ | 87957861 | anti- | AGCTGGC | 830. | CTTTAGCT | 906. | AGG | 7 | 0.6493 |
| | | | | 001304718. | 000010.11 | | sense | AGACCACA | | GGCAGAC | | | | |
| | | | | 1 | | | | AACTG | | CACAAACT | | | | |
| | | | | | | | | | | GAGGATC | | | | |
| PTEN | IL2 | IL2 high | 5728 | NM_ | NC_ | 87960940 | sense | ATTCTTCA | 831. | ATACATTC | 907. | AGG | 8 | 0.6697 |
| | | | | 001304718. | 000010.11 | | | TACCAGGA | | TTCATACC | | | | |
| | | | | 1 | | | | CCAG | | AGGACCA | | | | |
| | | | | | | | | | | GAGGAAA | | | | |
| PTEN | IL2 | IL2 high | 5728 | NM_ | NC_ | 87957915 | sense | CCAATTCA | 832. | TCCTCCAA | 908. | CGG | 7 | 0.6752 |
| | | | | 001304718. | 000010.11 | | | GGACCCAC | | TTCAGGAC | | | | |
| | | | | 1 | | | | ACGA | | CCACACGA | | | | |
| | | | | | | | | | | CGGGAA | | | | |
| MED12 | IL2 | IL2 high | 9968 | NM_ | NC_ | 71130165 | sense | ACATCGAC | 833. | ATCCACAT | 909. | AGG | 28 | 0.6457 |
| | | | | 005120.2 | 000023.11 | | | TGCTGGAC | | CGACTGCT | | | | |
| | | | | | | | | AATG | | GGACAAT | | | | |
| | | | | | | | | | | GAGGATG | | | | |
| MED12 | IL2 | IL2 high | 9968 | NM_ | NC_ | 71122231 | anti- | CAGTGAGT | 834. | CAGTCAGT | 910. | AGG | 8 | 0.688 |
| | | | | 005120.2 | 000023.11 | | sense | AGTGCCAA | | GAGTAGT | | | | |
| | | | | | | | | ACCA | | GCCAAACC | | | | |
| | | | | | | | | | | AAGGCAC | | | | |
| MED12 | IL2 | IL2 high | 9968 | NM_ | NC_ | 71125111 | anti- | GTGGCGT | 835. | ATGGGTG | 911. | TGG | 15 | 0.6661 |
| | | | | 005120.2 | 000023.11 | | sense | ACTGCACG | | GCGTACTG | | | | |
| | | | | | | | | TGTCG | | CACGTGTC | | | | |
| | | | | | | | | | | GTGGCTG | | | | |
| MED12 | IL2 | IL2 high | 9968 | NM_ | NC_ | 71126138 | sense | TTCACATT | 836. | ACCTTTCA | 912. | AGG | 18 | 0.6594 |
| | | | | 005120.2 | 000023.11 | | | ATGACCAA | | CATTATGA | | | | |
| | | | | | | | | CACC | | CCAACACC | | | | |
| | | | | | | | | | | AGGTCA | | | | |

TABLE 6
Nuclear factors that can be inhibited to decrease IL-2 expression or overexpressed to increase IL-2 expression

| | | | | | | Position | | | | | | | | |
|---|---|---|---|---|---|---|---|---|---|---|---|---|---|---|
| | | | | | | of Base | | sgRNA | SEQ | Target | SEQ | | | Rule |
| gene_ | screen_ | screen_ | Target | Target | Genomic | After Cut | | Target | ID | Context | ID | PAM | Exon | Set 2 |
| id | target | direction | Gene ID | Transcript | Sequence | (1-based) | Strand | Sequence | NO: | Sequence | NO: | Sequence | Number | score |
| SMARCB1 | IL2 | IL2 low | 6598 | NM_ | NC_ | 23791773 | anti- | GAGAACCT | 913. | TACAGAG | 1101. | AGG | 2 | 0.731 |
| | | | | 003073.3 | 000022.11 | | sense | CGGAACAT | | AACCTCGG | | | | |
| | | | | | | | | ACGG | | AACATACG | | | | |
| | | | | | | | | | | GAGGTAG | | | | |
| SMARCB1 | IL2 | IL2 low | 6598 | NM_ | NC_ | 23816887 | sense | GCAGATC | 914. | GACAGCA | 1102. | CGG | 6 | 0.6894 |
| | | | | 003073.3 | 000022.11 | | | GAGTCCTA | | GATCGAGT | | | | |
| | | | | | | | | CCCCA | | CCTACCCC | | | | |
| | | | | | | | | | | ACGGACA | | | | |
| SMARCB1 | IL2 | IL2 low | 6598 | NM_ | NC_ | 23801049 | anti- | TCTTCTTG | 915. | GTTCTCTT | 1103. | CGG | 4 | 0.6806 |
| | | | | 003073.3 | 000022.11 | | sense | TCTCGGCC | | CTTGTCTC | | | | |
| | | | | | | | | CATG | | GGCCCATG | | | | |
| | | | | | | | | | | CGGTTC | | | | |
| SMARCB1 | IL2 | IL2 low | 6598 | NM_ | NC_ | 23803342 | sense | TGAGAAC | 916. | TCCATGAG | 1104. | AGG | 5 | 0.6804 |
| | | | | 003073.3 | 000022.11 | | | GCATCTCA | | AACGCATC | | | | |
| | | | | | | | | GCCCG | | TCAGCCCG | | | | |
| | | | | | | | | | | AGGTGC | | | | |
| GTF2B | IL2 | IL2 low | 2959 | NM_ | NC_ | 88864042 | sense | ACAAAAG | 917. | AGCAACA | 1105. | TGG | 3 | 0.6003 |
| | | | | 001514.5 | 000001.11 | | | ATCCATCT | | AAAGATCC | | | | |
| | | | | | | | | CGAGT | | ATCTCGAG | | | | |
| | | | | | | | | | | TTGGAGA | | | | |
| GTF2B | IL2 | IL2 low | 2959 | NM_ | NC_ | 88857407 | anti- | AGTTGTAA | 918. | CCCCAGTT | 1106. | TGG | 6 | 0.6617 |
| | | | | 001514.5 | 000001.11 | | sense | TCAAATCC | | GTAATCAA | | | | |
| | | | | | | | | ACAC | | ATCCACAC | | | | |
| | | | | | | | | | | TGGTTT | | | | |
| GTF2B | IL2 | IL2 low | 2959 | NM_ | NC_ | 88887278 | sense | GATATGAT | 919. | CGGTGATA | 1107. | TGG | 2 | 0.627 |
| | | | | 001514.5 | 000001.11 | | | CTGTCCTG | | TGATCTGT | | | | |
| | | | | | | | | AATG | | CCTGAATG | | | | |
| | | | | | | | | | | TGGCTT | | | | |
| GTF2B | IL2 | IL2 low | 2959 | NM_ | NC_ | 88863986 | sense | TTTGTCTA | 920. | GAGATTTG | 1108. | AGG | 3 | 0.609 |
| | | | | 001514.5 | 000001.11 | | | CCATGATT | | TCTACCAT | | | | |
| | | | | | | | | GGCA | | GATTGGCA | | | | |
| | | | | | | | | | | AGGTAA | | | | |
| MTF1 | IL2 | IL2 low | 4520 | NM_ | NC_ | 37835092 | sense | AATGCACT | 921. | ATACAATG | 1109. | TGG | 6 | 0.6619 |
| | | | | 005955.2 | 000001.11 | | | TCCACAAC | | CACTTCCA | | | | |
| | | | | | | | | ACAA | | CAACACAA | | | | |
| | | | | | | | | | | TGGATC | | | | |
| MTF1 | IL2 | IL2 low | 4520 | NM_ | NC_ | 37857385 | anti- | AATGTGCT | 922. | AGATAATG | 1110. | GGG | 2 | 0.6361 |
| | | | | 005955.2 | 000001.11 | | sense | GCACATAA | | TGCTGCAC | | | | |
| | | | | | | | | CCCT | | ATAACCCT | | | | |
| | | | | | | | | | | GGGACA | | | | |
| MTF1 | IL2 | IL2 low | 4520 | NM_ | NC_ | 37839984 | sense | CCACGTGC | 923. | GGATCCAC | 1111. | AGG | 3 | 0.7358 |
| | | | | 005955.2 | 000001.11 | | | GAGTGCA | | GTGCGAG | | | | |
| | | | | | | | | CACGA | | TGCACACG | | | | |
| | | | | | | | | | | AAGGAGA | | | | |
| MTF1 | IL2 | IL2 low | 4520 | NM_ | NC_ | 37838644 | sense | GCACATTC | 924. | GGAAGCA | 1112. | GGG | 4 | 0.7005 |
| | | | | 005955.2 | 000001.11 | | | GAACTCAT | | CATTCGAA | | | | |
| | | | | | | | | ACAG | | CTCATACA | | | | |
| | | | | | | | | | | GGGGAAA | | | | |
| IL2 | IL2 | IL2 low | 3558 | NM_ | NC_ | 1.22E+08 | anti- | AAACTTAA | 925. | TGTAAAAC | 1113. | TGG | 2 | 0.6039 |
| | | | | 000586.3 | 000004.12 | | sense | ATGTGAGC | | TTAAATGT | | | | |
| | | | | | | | | ATCC | | GAGCATCC | | | | |
| | | | | | | | | | | TGGTGA | | | | |
| IL2 | IL2 | IL2 low | 3558 | NM_ | NC_ | 1.22E+08 | sense | ACAACTGG | 926. | AGCTACAA | 1114. | TGG | 1 | 0.531 |
| | | | | 000586.3 | 000004.12 | | | AGCATTTA | | CTGGAGC | | | | |
| | | | | | | | | CTGC | | ATTTACTG | | | | |
| | | | | | | | | | | CTGGATT | | | | |
| IL2 | IL2 | IL2 low | 3558 | NM_ | NC_ | 1.22E+08 | sense | AGAAGAA | 927. | GTCTAGAA | 1115. | TGG | 3 | 0.4893 |
| | | | | 000586.3 | 000004.12 | | | GAACTCAA | | GAAGAAC | | | | |
| | | | | | | | | ACCTC | | TCAAACCT | | | | |
| | | | | | | | | | | CTGGAGG | | | | |
| IL2 | IL2 | IL2 low | 3558 | NM_ | NC_ | 1.22E+08 | anti- | TTCTTTGT | 928. | TGTTTTCT | 1116. | AGG | 1 | 0.5452 |
| | | | | 000586.3 | 000004.12 | | sense | AGAACTTG | | TTGTAGAA | | | | |
| | | | | | | | | AAGT | | CTTGAAGT | | | | |
| | | | | | | | | | | AGGTGC | | | | |
| NFKB1 | IL2 | IL2 low | 4790 | NM_ | NC_ | 1.03E+08 | anti- | AAGTAGG | 929. | CCATAAGT | 1117. | GGG | 13 | 0.608 |
| | | | | 003998.3 | 000004.12 | | sense | AAATCCAT | | AGGAAAT | | | | |
| | | | | | | | | AGTGT | | CCATAGTG | | | | |
| | | | | | | | | | | TGGGAAG | | | | |
| NFKB1 | IL2 | IL2 low | 4790 | NM_ | NC_ | 1.03E+08 | anti- | GGCACCA | 930. | TAGAGGC | 1118. | GGG | 5 | 0.5997 |
| | | | | 003998.3 | 000004.12 | | sense | GGTAGTCC | | ACCAGGTA | | | | |
| | | | | | | | | ACCAT | | GTCCACCA | | | | |
| | | | | | | | | | | TGGGATG | | | | |
| NFKB1 | IL2 | IL2 low | 4790 | NM_ | NC_ | 1.03E+08 | anti- | TAGATGGC | 931. | GTCATAGA | 1119. | GGG | 8 | 0.6614 |
| | | | | 003998.3 | 000004.12 | | sense | GTCTGATA | | TGGCGTCT | | | | |
| | | | | | | | | CCAC | | GATACCAC | | | | |
| | | | | | | | | | | GGGTTC | | | | |
| NFKB1 | IL2 | IL2 low | 4790 | NM_ | NC_ | 1.03E+08 | anti- | TTGTCTAT | 932. | TTACTTGT | 1120. | GGG | 10 | 0.6663 |
| | | | | 003998.3 | 000004.12 | | sense | GAACATCT | | CTATGAAC | | | | |
| | | | | | | | | GTGG | | ATCTGTGG | | | | |
| | | | | | | | | | | GGGAAA | | | | |
| DNMT1 | IL2 | IL2 low | 1786 | NM_ | NC_ | 10146475 | sense | GAGGCAA | 933. | AGATGAG | 1121. | GGG | 27 | 0.7285 |
| | | | | 001379.2 | 000019.10 | | | AAAGAAA | | GCAAAAA | | | | |
| | | | | | | | | TCCCCA | | GAAATCCC | | | | |
| | | | | | | | | | | CAGGGTCC | | | | |
| DNMT1 | IL2 | IL2 low | 1786 | NM_ | NC_ | 10162681 | sense | GATTTCTG | 934. | CACAGATT | 1122. | AGG | 12 | 0.7345 |
| | | | | 001379.2 | 900001.10 | | | ATGAAAA | | TCTGATGA | | | | |
| | | | | | | | | AGACG | | AAAAGAC | | | | |
| | | | | | | | | | | GAGGATG | | | | |
| DNMT1 | IL2 | IL2 low | 1786 | NM_ | NC_ | 10142150 | sense | GCTCTACT | 935. | ACCTGCTC | 1123. | AGG | 29 | 0.6656 |
| | | | | 001379.2 | 000019.10 | | | GGAGCGA | | TACTGGAG | | | | |
| | | | | | | | | CGAGG | | CGACGAG | | | | |
| | | | | | | | | | | GAGGCCG | | | | |
| DNMT1 | IL2 | IL2 low | 1786 | NM_ | NC_ | 10151459 | sense | TCACCCAA | 936. | GCCGTCAC | 1124. | GGG | 23 | 0.7089 |
| | | | | 001379.2 | 000019.10 | | | AAAAATGC | | CCAAAAAA | | | | |
| | | | | | | | | ACCA | | ATGCACCA | | | | |
| | | | | | | | | | | GGGGAA | | | | |
| RELA | IL2 | IL2 low | 5970 | NM_ | NC_ | 65659757 | sense | ACTACGAC | 937. | GGGGACT | 1125. | CGG | 6 | 0.7259 |
| | | | | 001243984. | 000011.10 | | | CTGAATGC | | ACGACCTG | | | | |
| | | | | 1 | | | | TGTG | | AATGCTGT | | | | |
| | | | | | | | | | | GCGGCTC | | | | |
| RELA | IL2 | IL2 low | 5970 | NM_ | NC_ | 65662009 | sense | GCTTCCGC | 938. | ATGCGCTT | 1126. | GGG | 3 | 0.7137 |
| | | | | 001243984. | 000011.10 | | | TACAAGTG | | CCGCTACA | | | | |
| | | | | 1 | | | | CGAG | | AGTGCGA | | | | |
| | | | | | | | | | | GGGGCGC | | | | |
| RELA | IL2 | IL2 low | 5970 | NM_ | NC_ | 65658759 | anti- | GGAAGAT | 939. | AGTAGGA | 1127. | AGG | 7 | 0.7554 |
| | | | | 001243984. | 000011.10 | | sense | CTCATCCC | | AGATCTCA | | | | |
| | | | | 1 | | | | CACCG | | TCCCCACC | | | | |
| | | | | | | | | | | GAGGCAG | | | | |
| RELA | IL2 | IL2 low | 5970 | NM_ | NC_ | 65661818 | sense | TCAATGGC | 940. | CAGATCAA | 1128. | GGG | 4 | 0.7164 |
| | | | | 001243984. | 000011.10 | | | TACACAGG | | TGGCTACA | | | | |
| | | | | 1 | | | | ACCA | | CAGGACC | | | | |
| | | | | | | | | | | AGGGACA | | | | |
| MAF | IL2 | IL2 low | 4094 | NM_ | NC_ | 79599622 | sense | GAAGACT | 941. | CCTGGAA | 1129. | CGG | 1 | 0.5494 |
| | | | | 005360.4 | 000016.10 | | | ACTACTGG | | GACTACTA | | | | |
| | | | | | | | | ATGAC | | CTGGATGA | | | | |
| | | | | | | | | | | CCGGCTA | | | | |
| MAF | IL2 | IL2 low | 4094 | NM_ | NC_ | 79599416 | anti- | GATCACG | 942. | CGGCGATC | 1130. | CGG | 1 | 0.7152 |
| | | | | 005360.4 | 000016.10 | | sense | GCGGACA | | ACGGCGG | | | | |
| | | | | | | | | CCACGG | | ACACCACG | | | | |
| | | | | | | | | | | GCGGCGG | | | | |
| MAF | IL2 | IL2 low | 4094 | NM_ | NC_ | 79599725 | anti- | GCTGCACG | 943. | CCGAGCTG | 1131. | GGG | 1 | 0.7019 |
| | | | | 005360.4 | 000016.10 | | sense | GCGTGCTC | | CACGGCGT | | | | |
| | | | | | | | | ATGG | | GCTCATGG | | | | |
| | | | | | | | | | | GGGTGG | | | | |
| MAF | IL2 | IL2 low | 4094 | NM_ | NC_ | 79599797 | sense | TGAAGTG | 944. | AGTTTGAA | 1132. | TGG | 1 | 0.6793 |
| | | | | 005360.4 | 000016.10 | | | AAAAAGG | | GTGAAAA | | | | |
| | | | | | | | | AACCGG | | AGGAACC | | | | |
| | | | | | | | | | | GGTGGAG | | | | |
| | | | | | | | | | | A | | | | |
| XBP1 | IL2 | IL2 low | 7494 | NM_ | NC_ | 28797122 | sense | AGGAGTT | 945. | AACCAGG | 1133. | GGG | 3 | 0.5997 |
| | | | | 005080.3 | 000022.11 | | | AAGACAG | | AGTTAAGA | | | | |
| | | | | | | | | CGCTTG | | CAGCGCTT | | | | |
| | | | | | | | | | | GGGGATG | | | | |
| XBP1 | IL2 | IL2 low | 7494 | NM_ | NC_ | 28800395 | sense | CATGGTGC | 946. | CGCTCATG | 1134. | GGG | 1 | 0.6268 |
| | | | | 005080.3 | 000022.11 | | | CAGCCCAG | | GTGCCAGC | | | | |
| | | | | | | | | AGAG | | CCAGAGA | | | | |
| | | | | | | | | | | GGGGCCA | | | | |
| XBP1 | IL2 | IL2 low | 7494 | NM_ | NC_ | 28796184 | sense | CCTCCCAG | 947. | CTTTCCTC | 1135. | AGG | 4 | 0.6692 |
| | | | | 005080.3 | 000022.11 | | | GGGAATG | | CCAGGGG | | | | |
| | | | | | | | | AAGTG | | AATGAAGT | | | | |
| | | | | | | | | | | GAGGCCA | | | | |
| XBP1 | IL2 | IL2 low | 7494 | NM_ | NC_ | 28800465 | sense | CTAAAGTT | 948. | ACCCCTAA | 1136. | GGG | 1 | 0.5959 |
| | | | | 005080.3 | 000022.11 | | | CTGCTTCT | | AGTTCTGC | | | | |
| | | | | | | | | GTCG | | TTCTGTCG | | | | |
| | | | | | | | | | | GGGCAG | | | | |
| BCL11B | IL2 | IL2 low | 64919 | NM_ | NC_ | 99175544 | sense | AGCAAGTC | 949. | CAAGAGC | 1137. | CGG | 4 | 0.6246 |
| | | | | 200128237. | 000014.9 | | | GTGCGAG | | AAGTCGTG | | | | |
| | | | | 1 | | | | TTCTG | | CGAGTTCT | | | | |
| | | | | | | | | | | GCGGCAA | | | | |
| BCL11B | IL2 | IL2 low | 64919 | NM_ | NC_ | 99176056 | sense | CCAGCAGC | 950. | CCGGCCA | 1138. | CGG | 4 | 0.6152 |
| | | | | 001282237. | 000014.9 | | | TCGCTCAC | | GCAGCTCG | | | | |
| | | | | 1 | | | | GCCG | | CTCACGCC | | | | |
| | | | | | | | | | | GCGGCTC | | | | |
| BCL11B | IL2 | IL2 low | 64919 | NM_ | NC_ | 99175744 | sense | CCGCCATG | 951. | TCGCCCGC | 1139. | CGG | 4 | 0.7423 |
| | | | | 001282237. | 000014.9 | | | GACTTCTC | | CATGGACT | | | | |
| | | | | 1 | | | | GCGG | | TCTCGCGG | | | | |
| | | | | | | | | | | CGGCTC | | | | |
| BCL11B | IL2 | IL2 low | 64919 | NM_ | NC_ | 99231381 | sense | TCAGGGT | 952. | GGACTCA | 1140. | AGG | 3 | 0.6195 |
| | | | | 001282237. | 000014.9 | | | GAGGGTC | | GGGTGAG | | | | |
| | | | | 1 | | | | AGACGG | | GGTCAGA | | | | |
| | | | | | | | | | | CGGAGGC | | | | |
| | | | | | | | | | | TC | | | | |
| ETS1 | IL2 | IL2 low | 2113 | NM_ | NC_ | 1.28E+08 | anti- | CTTACTAA | 953. | TGAACTTA | 1141. | AGG | 4 | 0.6808 |
| | | | | 005238.3 | 000011.10 | | sense | TGAAGTAA | | CTAATGAA | | | | |
| | | | | | | | | TCCG | | GTAATCCG | | | | |
| | | | | | | | | | | AGGTAT | | | | |
| ETS1 | IL2 | IL2 low | 2113 | NM_ | NC_ | 1.28E+08 | anti- | GAGAAAG | 954. | GCTCGAG | 1142. | GGG | 3 | 0.6487 |
| | | | | 005238.3 | 000011.10 | | sense | CAGTCTTT | | AAAGCAG | | | | |
| | | | | | | | | ACCCA | | TCTTTACC | | | | |
| | | | | | | | | | | CAGGGCG | | | | |
| | | | | | | | | | | C | | | | |
| ETS1 | IL2 | IL2 low | 2113 | NM_ | NC_ | 1.28E+08 | anti- | GGTCTCG | 955. | AGAGGGT | 1143. | GGG | 5 | 0.7649 |
| | | | | 005238.3 | 000011.10 | | sense | GAGAATG | | CTCGGAG | | | | |
| | | | | | | | | ACCGAG | | AATGACCG | | | | |
| | | | | | | | | | | AGGGGTA | | | | |
| | | | | | | | | | | G | | | | |
| ETS1 | IL2 | IL2 low | 2113 | NM_ | NC_ | 1.28E+08 | sense | TGCATGG | 956. | CATGTGCA | 1144. | TGG | 5 | 0.6503 |
| | | | | 005238.3 | 000011.10 | | | GGAGGAC | | TGGGGAG | | | | |
| | | | | | | | | CAGTCG | | GACCAGTC | | | | |
| | | | | | | | | | | GTGGTAG | | | | |
| ZBTB7B | IL2 | IL2 low | 51043 | NM_ | NC_ | 1.55E+08 | sense | AGCAAACC | 957. | CCAGAGC | 1145. | AGG | 2 | 0.6906 |
| | | | | 001256455. | 000001.11 | | | ACCTAGTC | | AAACCACC | | | | |
| | | | | 1 | | | | CCTG | | TAGTCCCT | | | | |
| | | | | | | | | | | GAGGTGC | | | | |
| ZBTB7B | IL2 | IL2 low | 51043 | NM_ | NC_ | 1.55E+08 | sense | CAGAGCTA | 958. | TCCCCAGA | 1146. | GGG | 2 | 0.6187 |
| | | | | 001256455. | 000001.11 | | | CGAACCCT | | GCTACGAA | | | | |
| | | | | 1 | | | | ATGA | | CCCTATGA | | | | |
| | | | | | | | | | | GGGTGA | | | | |
| ZBTB7B | IL2 | IL2 low | 51043 | NM_ | NC_ | 1.55E+08 | anti- | TCCGGATG | 959. | TGCGTCCG | 1147. | AGG | 2 | 0.6762 |
| | | | | 001256455. | 000001.11 | | sense | GTGAGGT | | GATGGTG | | | | |
| | | | | 1 | | | | CACAT | | AGGTCACA | | | | |
| | | | | | | | | | | TAGGTGG | | | | |
| ZBTB7B | IL2 | IL2 low | 51043 | NM_ | NC_ | 1.55E+08 | anti- | TGTATAGG | 960. | TGGCTGTA | 1148. | GGG | 2 | 0.6181 |
| | | | | 001256455. | 000001.11 | | sense | CAAATTCA | | TAGGCAA | | | | |
| | | | | 1 | | | | AGGA | | ATTCAAGG | | | | |
| | | | | | | | | | | AGGGCGC | | | | |
| MED30 | IL2 | IL2 low | 90390 | NM_ | NC_ | 1.18E+08 | sense | ACACTGGA | 961. | TACCACAC | 1149. | CGG | 2 | 0.6317 |
| | | | | 080651.3 | 000008.11 | | | ACATATCA | | TGGAACAT | | | | |
| | | | | | | | | AGAC | | ATCAAGAC | | | | |
| | | | | | | | | | | CGGTTA | | | | |
| MED30 | IL2 | IL2 low | 90390 | NM_ | NC_ | 1.18E+08 | sense | GACAAAT | 962. | ATATGACA | 1150. | TGG | 2 | 0.7364 |
| | | | | 080651.3 | 000008.11 | | | GCAATGA | | AATGCAAT | | | | |
| | | | | | | | | AAACTG | | GAAAACT | | | | |
| | | | | | | | | | | GTGGTGG | | | | |
| MED30 | IL2 | IL2 low | 90390 | NM_ | NC_ | 1.18E+08 | sense | GGACATC | 963. | TGCAGGA | 1151. | TGG | 1 | 0.6878 |
| | | | | 080651.3 | 000008.11 | | | GTGTACCG | | CATCGTGT | | | | |
| | | | | | | | | CACCA | | ACCGCACC | | | | |
| | | | | | | | | | | ATGGAGA | | | | |
| MED30 | IL2 | IL2 low | 90390 | NM_ | NC_ | 1.18E+08 | sense | GGCCGCCC | 964. | AGCAGGC | 1152. | CGG | 1 | 0.5967 |
| | | | | 080651.3 | 000008.11 | | | GGGAAGT | | CGCCCGG | | | | |
| | | | | | | | | CAACA | | GAAGTCA | | | | |
| | | | | | | | | | | ACACGGC | | | | |
| | | | | | | | | | | GT | | | | |
| YBX1 | IL2 | IL2 low | 4904 | NM_ | NC_ | 42696740 | sense | AGACGCTA | 965. | TTATAGAC | 1153. | GGG | 5 | 0.6497 |
| | | | | 004559.3 | 000001.11 | | | TCCACGTC | | GCTATCCA | | | | |
| | | | | | | | | GTAG | | CGTCGTAG | | | | |
| | | | | | | | | | | GGGTCC | | | | |
| YBX1 | IL2 | IL2 low | 4904 | NM_ | NC_ | 42696671 | sense | GCAAATGT | 966. | GGCAGCA | 1154. | TGG | 5 | 0.6973 |
| | | | | 004559.3 | 000001.11 | | | TACAGGTC | | AATGTTAC | | | | |
| | | | | | | | | CTGG | | AGGTCCTG | | | | |
| | | | | | | | | | | GTGGTGT | | | | |
| YBX1 | IL2 | IL2 low | 4904 | NM_ | NC_ | 42682727 | sense | GGCGGGG | 967. | TGCCGGC | 1155. | CGG | 1 | 0.5977 |
| | | | | 004559.3 | 000001.11 | | | ACAAGAA | | GGGGACA | | | | |
| | | | | | | | | GGTCAT | | AGAAGGT | | | | |
| | | | | | | | | | | CATCGGTG | | | | |
| | | | | | | | | | | A | | | | |
| YBX1 | IL2 | IL2 low | 4904 | NM_ | NC_ | 42693498 | sense | GTCTTGCA | 968. | TTCTGTCT | 1156. | AGG | 3 | 0.6955 |
| | | | | 004559.3 | 000001.11 | | | GGAATGA | | TGCAGGA | | | | |
| | | | | | | | | CACCA | | ATGACACC | | | | |
| | | | | | | | | | | AAGGAAG | | | | |
| ZBTB7A | IL2 | IL2 low | 51341 | NM_ | NC_ | 4054925 | sense | ACCGTCAG | 969. | GCTCACCG | 1157. | GGG | 2 | 0.6826 |
| | | | | 015898.2 | 000019.10 | | | CACAGCCA | | TCAGCACA | | | | |
| | | | | | | | | ACGT | | GCCAACGT | | | | |
| | | | | | | | | | | GGGTGA | | | | |
| ZBTB7A | IL2 | IL2 low | 51341 | NM_ | NC_ | 4054671 | anti- | ATCATCGG | 970. | GGTCATCA | 1158. | CGG | 2 | 0.6019 |
| | | | | 015898.2 | 000019.10 | | sense | ACGCCCCA | | TCGGACGC | | | | |
| | | | | | | | | AAGG | | CCCAAAG | | | | |
| | | | | | | | | | | GCGGACC | | | | |
| ZBTB7A | IL2 | IL2 low | 51341 | NM_ | NC_ | 4054199 | sense | GAGTCGC | 971. | CGAGGAG | 1159. | GGG | 2 | 0.6111 |
| | | | | 015898.2 | 000019.10 | | | GGGCCGA | | TCGCGGG | | | | |
| | | | | | | | | CGACAA | | CCGACGAC | | | | |
| | | | | | | | | | | AAGGGCG | | | | |
| | | | | | | | | | | T | | | | |
| ZBTB7A | IL2 | IL2 low | 51341 | NM_ | NC_ | 4054431 | anti- | GCCGTAGT | 972. | CGCGGCC | 1160. | TGG | 2 | 0.6268 |
| | | | | 015898.2 | 000019.10 | | sense | GGCCGTTC | | GTAGTGG | | | | |
| | | | | | | | | TGCG | | CCGTTCTG | | | | |
| | | | | | | | | | | CGTGGCG | | | | |
| | | | | | | | | | | G | | | | |
| ATXN7L3 | IL2 | IL2 low | 56970 | NM_ | NC_ | 44197610 | sense | CACGGACC | 973. | ACGACAC | 1161. | AGG | 2 | 0.6328 |
| | | | | 001098833. | 000017.11 | | | CTGATAGC | | GGACCCTG | | | | |
| | | | | 1 | | | | ATGA | | ATAGCATG | | | | |
| | | | | | | | | | | AAGGATT | | | | |
| ATXN7L3 | IL2 | IL2 low | 56970 | NM_ | NC_ | 44197712 | sense | CATCGCTC | 974. | AGGCCATC | 1162. | CGG | 2 | 0.7491 |
| | | | | 001098833. | 000017.11 | | | AGGAGAT | | GCTCAGG | | | | |
| | | | | 1 | | | | ATACG | | AGATATAC | | | | |
| | | | | | | | | | | GCGGACC | | | | |
| ATXN7L3 | IL2 | IL2 low | 56970 | NM_ | NC_ | 44197233 | sense | GCAGCCG | 975. | AACAGCA | 1163. | CGG | 3 | 0.6135 |
| | | | | 001098833. | 000017.11 | | | AATCGCCA | | GCCGAATC | | | | |
| | | | | 1 | | | | ACCGC | | GCCAACCG | | | | |
| | | | | | | | | | | CCGGTGA | | | | |
| ATXN7L3 | IL2 | IL2 low | 56970 | NM_ | NC_ | 44195424 | sense | GCTTCGCA | 976. | AGGAGCTT | 1164. | CGG | 8 | 0.6566 |
| | | | | 001098833. | 000017.11 | | | GCCTGCTA | | CGCAGCCT | | | | |
| | | | | 1 | | | | ACCA | | GCTAACCA | | | | |
| | | | | | | | | | | CGGTGA | | | | |
| SRF | IL2 | IL2 low | 6722 | NM_ | NC_ | 43175724 | anti- | AGGTTGG | 977. | CGGCAGG | 1165. | CGG | 3 | 0.6646 |
| | | | | 003131.3 | 000006.12 | | sense | TGACTGTG | | TTGGTGAC | | | | |
| | | | | | | | | AACGC | | TGTGAACG | | | | |
| | | | | | | | | | | CCGGCTT | | | | |
| SRF | IL2 | IL2 low | 6722 | NM_ | NC_ | 43172119 | sense | AGTTCATC | 978. | ATGGAGTT | 1166. | CGG | 1 | 0.7054 |
| | | | | 003131.3 | 000006.12 | | | GACAACA | | CATCGACA | | | | |
| | | | | | | | | AGCTG | | ACAAGCTG | | | | |
| | | | | | | | | | | CGGCGC | | | | |
| SRF | IL2 | IL2 low | 6722 | NM_ | NC_ | 43175844 | anti- | GGGCTGA | 979. | ACTGGGG | 1167. | TGG | 3 | 0.65 |
| | | | | 003131.3 | 000006.12 | | sense | CACTAGCA | | CTGACACT | | | | |
| | | | | | | | | GACAC | | AGCAGAC | | | | |
| | | | | | | | | | | ACTGGTGC | | | | |
| SRF | IL2 | IL2 low | 6722 | NM_ | NC_ | 43174015 | anti- | TCTGTTGT | 980. | CTGGTCTG | 1168. | GGG | 2 | 0.605 |
| | | | | 003131.3 | 000006.12 | | sense | GGGGTCT | | TTGTGGG | | | | |
| | | | | | | | | GAACG | | GTCTGAAC | | | | |
| | | | | | | | | | | GGGGTGG | | | | |
| YY1 | IL2 | IL2 low | 7528 | NM_ | NC_ | 1E+08 | sense | AGATATTG | 981. | AAAAAGA | 1169. | TGG | 2 | 0.667 |
| | | | | 003403.4 | 000014.9 | | | ACCATGAG | | TATTGACC | | | | |
| | | | | | | | | ACAG | | ATGAGAC | | | | |
| | | | | | | | | | | AGTGGTT | | | | |
| | | | | | | | | | | G | | | | |
| YY1 | IL2 | IL2 low | 7528 | NM_ | NC_ | 1E+08 | sense | GGAGACC | 982 | CGGTGGA | 1170. | ITGG | 1 | 0.7975 |
| | | | | 003403.4 | 000014.9 | | | ATCGAGAC | | GACCATCG | | | | |
| | | | | | | | | CACAG | | AGACCACA | | | | |
| | | | | | | | | | | GTGGTGG | | | | |
| YY1 | IL2 | IL2 low | 7528 | NM_ | NC_ | 1E+08 | sense | GGTCACCG | 983. | CGCTGGTC | 1171. | AGG | 1 | 0.6314 |
| | | | | 003403.4 | 000014.9 | | | ACGACCCG | | ACCGACG | | | | |
| | | | | | | | | ACCC | | ACCCGACC | | | | |
| | | | | | | | | | | CAGGTGC | | | | |
| YY1 | IL2 | IL2 low | 7528 | NM_ | NC_ | 1E+08 | sense | TGAACAAA | 984. | ACATTGAA | 1172. | TGG | 1 | 0.7093 |
| | | | | 003403.4 | 000014.9 | | | CGCTGGTC | | CAAACGCT | | | | |
| | | | | | | | | ACCG | | GGTCACCG | | | | |
| | | | | | | | | | | TGGCGG | | | | |
| HINFP | IL2 | IL2 low | 25988 | NM_ | NC_ | 1.19E+08 | sense | CACACCAA | 985. | CTACCACA | 1173. | GGG | 4 | 0.6982 |
| | | | | 015517.4 | 000011.10 | | | GCTGAAAC | | CCAAGCTG | | | | |
| | | | | | | | | AGTG | | AAACAGT | | | | |
| | | | | | | | | | | GGGGGCT | | | | |
| HINFP | IL2 | IL2 low | 25988 | NM_ | NC_ | 1.19E+08 | sense | CATGCGCT | 986. | ACCACATG | 1174. | AGG | 8 | 0.7351 |
| | | | | 015517.4 | 000011.10 | | | TTCGTCAC | | CGCTTTCG | | | | |
| | | | | | | | | AGTG | | TCACAGTG | | | | |
| | | | | | | | | | | AGGACC | | | | |
| HINFP | IL2 | IL2 low | 25988 | NM_ | NC_ | 1.19E+08 | anti- | GGTGCTCT | 987. | CGGAGGT | 1175. | CGG | 6 | 0.7508 |
| | | | | 015517.4 | 000011.10 | | sense | CGAAGTTT | | GCTCTCGA | | | | |
| | | | | | | | | ACTG | | AGTTTACT | | | | |
| | | | | | | | | | | GCGGTCC | | | | |
| HINFP | IL2 | IL2 low | 25988 | NM_ | NC_ | 1.19E+08 | anti- | TGACTACT | 988. | CCTCTGAC | 1176. | AGG | 6 | 0.7145 |
| | | | | 015517.4 | 000011.10 | | sense | TACGATCC | | TACTTACG | | | | |
| | | | | | | | | AATG | | ATCCAATG | | | | |
| | | | | | | | | | | AGGTCT | | | | |
| MED14 | IL2 | IL2 low | 9282 | NM_ | NC_ | 40692233 | anti- | ATCACACA | 989. | TTGTATCA | 1177. | GGG | 15 | 0.6711 |
| | | | | 004229.3 | 000023.11 | | sense | TAGCGAC | | CACATAGC | | | | |
| | | | | | | | | GAAGT | | GACGAAG | | | | |
| | | | | | | | | | | TGGGCTA | | | | |
| MED14 | IL2 | IL2 low | 9282 | NM_ | NC_ | 40714644 | anti- | CAGAGCAT | 990. | GGACCAG | 1178. | AGG | 4 | 0.6206 |
| | | | | 004229.3 | 000023.11 | | sense | CTCTAGCT | | AGCATCTC | | | | |
| | | | | | | | | AACG | | TAGCTAAC | | | | |
| | | | | | | | | | | GAGGCCA | | | | |
| MED14 | IL2 | IL2 low | 9282 | NM_ | NC_ | 40682898 | anti- | CTAACTCT | 991. | AACACTAA | 1179. | CGG | 17 | 0.7032 |
| | | | | 004229.3 | 000023.11 | | sense | GCTACCCA | | CTCTGCTA | | | | |
| | | | | | | | | AGTG | | CCCAAGTG | | | | |
| | | | | | | | | | | CGGTTA | | | | |
| MED14 | IL2 | IL2 low | 9282 | NM_ | NC_ | 40711237 | sense | TAATGTTA | 992. | ACTCTAAT | 1180. | TGG | 8 | 0.6368 |
| | | | | 004229.3 | 300002.11 | | | ATCCGAGA | | GTTAATCC | | | | |
| | | | | | | | | ACGG | | GAGAACG | | | | |
| | | | | | | | | | | GTGGGGA | | | | |
| TUBB | IL2 | IL2 low | 203068 | NM_ | NC_ | 30722938 | anti- | AGATCCAC | 993. | TTCTAGAT | 1181. | AGG | 3 | 0.7005 |
| | | | | 178014.3 | 000006.12 | | sense | CAGGATG | | CCACCAGG | | | | |
| | | | | | | | | GCACG | | ATGGCAC | | | | |
| | | | | | | | | | | GAGGAAC | | | | |
| TUBB | IL2 | IL2 low | 203068 | NM_ | NC_ | 30722589 | sense | CCCCACCG | 994. | TCGACCCC | 1182. | GGG | 2 | 0.7034 |
| | | | | 178014.3 | 000006.12 | | | GCACCTAC | | ACCGGCAC | | | | |
| | | | | | | | | CACG | | CTACCACG | | | | |
| | | | | | | | | | | GGGACA | | | | |
| TUBB | IL2 | IL2 low | 203068 | NM_ | NC_ | 30723346 | sense | CTGCATTC | 995. | CTGACTGC | 1183. | GGG | 4 | 0.6146 |
| | | | | 178014.3 | 000006.12 | | | CAGGTCA | | ATTCCAGG | | | | |
| | | | | | | | | GTCTG | | TCAGTCTG | | | | |
| | | | | | | | | | | GGGCAG | | | | |
| TUBB | IL2 | IL2 low | 203068 | NM_ | NC_ | 30723727 | sense | GCTGACCA | 996. | TGAAGCTG | 1184. | GGG | 4 | 0.7623 |
| | | | | 178014.3 | 000006.12 | | | CACCAACC | | ACCACACC | | | | |
| | | | | | | | | TACG | | AACCTACG | | | | |
| | | | | | | | | | | GGGATC | | | | |
| MED11 | IL2 | IL2 low | 400569 | NM_ | NC_ | 4731567 | anti- | ATCCCGAA | 997. | TCGCATCC | 1185. | AGG | 1 | 0.567 |
| | | | | 001001683. | 000017.11 | | sense | CCTGCATT | | CGAACCTG | | | | |
| | | | | 3 | | | | CTGA | | CATTCTGA | | | | |
| | | | | | | | | | | AGGATG | | | | |
| MED11 | IL2 | IL2 low | 400569 | NM_ | NC_ | 4731863 | sense | CACCGCTT | 998. | CCTTCACC | 1186. | TGG | 2 | 0.6458 |
| | | | | 001001683. | 000017.11 | | | CAGTGCAA | | GCTTCAGT | | | | |
| | | | | | | | | CACG | | GCAACAC | | | | |
| | | | | | | | | | | GTGGAGG | | | | |
| MED11 | IL2 | IL2 low | 400569 | NM_ | NC_ | 4731814 | sense | CCAAGGA | 999. | TTGTCCAA | 1187. | CGG | 2 | 0.6925 |
| | | | | 3001001683. | 000017.11 | | | AAAAACTA | | GGAAAAA | | | | |
| | | | | 3 | | | | ACGAG | | ACTAACGA | | | | |
| | | | | | | | | | | GCGGCTC | | | | |
| MED11 | IL2 | IL2 low | 400569 | NM_ | NC_ | 4731833 | sense | GCGGCTCC | 1000. | ACGAGCG | 1188. | CGG | 2 | 0.6487 |
| | | | | 001001683. | 000017.11 | | | TAGACCG | | GCTCCTAG | | | | |
| | | | | 3 | | | | GCAGG | | ACCGGCA | | | | |
| | | | | | | | | | | GGCGGCG | | | | |
| | | | | | | | | | | G | | | | |
| FOXD4L5 | IL2 | IL2 low | 653427 | NM_ | NC_ | 65283612 | anti- | AGCGTAA | 1001. | GCAGAGC | 1189. | GGG | 1 | 0.68 |
| | | | | 001126334. | 000009.12 | | sense | GGGCATCT | | GTAAGGG | | | | |
| | | | | 1 | | | | CCCGG | | CATCTCCC | | | | |
| | | | | | | | | | | GGGGGCG | | | | |
| | | | | | | | | | | G | | | | |
| FOXD4L5 | IL2 | IL2 low | 653427 | NM_ | NC_ | 65284136 | anti- | CAAACTCT | 1002. | GTGCCAAA | 1190. | GGG | 1 | 0.6038 |
| | | | | 001126334. | 000009.12 | | sense | GAGGGGT | | CTCTGAGG | | | | |
| | | | | 1 | | | | CACTC | | GGTCACTC | | | | |
| | | | | | | | | | | GGGCCG | | | | |
| FOXD4L5 | IL2 | IL2 low | 653427 | NM_ | NC_ | 65284210 | sense | TAGAGCA | 1003. | TTCCTAGA | 1191. | GGG | 1 | 0.5918 |
| | | | | 001126334. | 000009.12 | | | GTCACTCC | | GCAGTCAC | | | | |
| | | | | 1 | | | | AGCCG | | TCCAGCCG | | | | |
| | | | | | | | | | | GGGCTG | | | | |
| FOXD4L5 | IL2 | IL2 low | 653427 | NM_ | NC_ | 65283953 | anti- | TGCGGCG | 1004. | AACTTGCG | 1192. | CGG | 1 | 0.5887 |
| | | | | 001126334. | 000009.12 | | sense | GTAGTATG | | GCGGTAG | | | | |
| | | | | 1 | | | | GGAÅG | | TATGGGA | | | | |
| | | | | | | | | | | AGCGGCC | | | | |
| | | | | | | | | | | A | | | | |
| MBD2 | IL2 | IL2 low | 8932 | NM_ | NC_ | 54224170 | sense | AGCCGGTC | 1005. | CGGGAGC | 1193. | GGG | 1 | 0.5949 |
| | | | | 003927.4 | 000018.10 | | | CCTTTCCC | | CGGTCCCT | | | | |
| | | | | | | | | GTCG | | TTCCCGTC | | | | |
| | | | | | | | | | | GGGGAGC | | | | |
| MBD2 | IL2 | IL2 low | 8932 | NM_ | NC_ | 54205113 | sense | CCTCAGTT | 1006. | CAAGCCTC | 1194. | GGG | 2 | 0.5818 |
| | | | | 003927.4 | 000018.10 | | | GGCAAGG | | AGTTGGCA | | | | |
| | | | | | | | | TACCT | | AGGTACCT | | | | |
| | | | | | | | | | | GGGAAA | | | | |
| MBD2 | IL2 | IL2 low | 8932 | NM_ | NC_ | 54204999 | sense | CCTCTCAA | 1007. | CGATCCTC | 1195. | TGG | 2 | 0.5401 |
| | | | | 003927.4 | 000018.10 | | | TCAAAATA | | TCAATCAA | | | | |
| | | | | | | | | AGGT | | AATAAGGT | | | | |
| | | | | | | | | | | TGGTTA | | | | |
| MBD2 | IL2 | IL2 low | 8932 | NM_ | NC_ | 54224048 | sense | CGAAAATC | 1008. | GATCCGAA | 1196. | ITGG | 1 | 0.494 |
| | | | | 003927.4 | 000018.10 | | | TGGGCTAA | | AATCTGGG | | | | |
| | | | | | | | | GTGC | | CTAAGTGC | | | | |
| | | | | | | | | | | TGGCAA | | | | |
| DMAP1 | IL2 | IL2 low | 55929 | NM_ | NC_ | 44218708 | sense | ATGCTGG | 1009. | TTTGATGC | 1197. | CGG | 6 | 0.6518 |
| | | | | 001034023. | 000001.11 | | | GCACGAA | | TGGGCAC | | | | |
| | | | | 1 | | | | CGACGG | | GAACGAC | | | | |
| | | | | | | | | | | GGCGGAA | | | | |
| | | | | | | | | | | G | | | | |
| DMAP1 | IL2 | IL2 low | 55929 | NM_ | NC_ | 44218427 | anti- | CATGGATA | 1010. | CGGTCATG | 1198. | AGG | 5 | 0.7087 |
| | | | | 001034023. | 000001.11 | | sense | ACAACAAA | | GATAACAA | | | | |
| | | | | 1 | | | | ACGC | | CAAAACGC | | | | |
| | | | | | | | | | | AGGTCA | | | | |
| DMAP1 | IL2 | IL2 low | 55929 | NM_ | NC_ | 44219225 | sense | GAAGCTAC | 1011. | AAAAGAA | 1199. | AGG | 7 | 0.693 |
| | | | | 001034023. | 000001.11 | | | CCCAGAAA | | GCTACCCC | | | | |
| | | | | 1 | | | | AAGG | | AGAAAAA | | | | |
| | | | | | | | | | | GGAGGCT | | | | |
| | | | | | | | | | | G | | | | |
| DMAP1 | IL2 | IL2 low | 55929 | NM_ | NC_ | 44213854 | sense | GGACATTA | 1012. | AGAAGGA | 1200. | AGG | 2 | 0.6418 |
| | | | | 001034023. | 000001.11 | | | TCAACCCG | | CATTATCA | | | | |
| | | | | 1 | | | | GACA | | ACCCGGAC | | | | |
| | | | | | | | | | | AAGGTAG | | | | |
| ABCF1 | IL2 | IL2 low | 23 | NM_ | NC_ | 30584469 | sense | CTGCAGA | 1013. | GCAGCTGC | 1201. | CGG | 14 | 0.6725 |
| | | | | 001025091. | 000006.12 | | | GGCCAAA | | AGAGGCC | | | | |
| | | | | 1 | | | | GCACGG | | AAAGCAC | | | | |
| | | | | | | | | | | GGCGGAT | | | | |
| | | | | | | | | | | C | | | | |
| ABCF1 | IL2 | IL2 low | 23 | NM_ | NC_ | 30583082 | sense | GATGGAG | 1014. | CTCAGATG | 1202. | TGG | 10 | 0.7118 |
| | | | | 001025091. | 000006.12 | | | TATGAGCG | | GAGTATG | | | | |
| | | | | 1 | | | | CCAAG | | AGCGCCA | | | | |
| | | | | | | | | | | AGTGGCTT | | | | |
| ABCF1 | IL2 | IL2 low | 23 | NM_ | NC_ | 30583862 | anti- | GCAACACA | 1015. | CACAGCAA | 1203. | GGG | 12 | 0.6289 |
| | | | | 001025091. | 000006.12 | | sense | TCAATGTT | | CACATCAA | | | | |
| | | | | 1 | | | | GGGA | | TGTTGGG | | | | |
| | | | | | | | | | | AGGGATG | | | | |
| ABCF1 | IL2 | IL2 low | 23 | NM_ | NC_ | 30585666 | anti- | TGTAATTG | 1016. | TTACTGTA | 1204. | TGG | 16 | 0.5878 |
| | | | | 001025091. | 000006.12 | | sense | CCCCTATA | | ATTGCCCC | | | | |
| | | | | 1 | | | | GTAG | | TATAGTAG | | | | |
| | | | | | | | | | | TGGAGC | | | | |
| ATF6B | IL2 | IL2 low | 1388 | NM_ | NC_ | 32121301 | sense | ATGTTCTT | 1017. | CTCCATGT | 1205. | AGG | 6 | 0.6359 |
| | | | | 004381.4 | 000006.12 | | | CCGTCAAC | | TCTTCCGT | | | | |
| | | | | | | | | TCTG | | CAACTCTG | | | | |
| | | | | | | | | | | AGGCCT | | | | |
| ATF6B | IL2 | IL2 low | 1388 | NM_ | NC_ | 32127108 | sense | CTCCACAG | 1018. | GTCTCTCC | 1206. | AGG | 4 | 0.7161 |
| | | | | 004381.4 | 000006.12 | | | AGCCATCC | | ACAGAGC | | | | |
| | | | | | | | | AGCG | | CATCCAGC | | | | |
| | | | | | | | | | | GAGGTGA | | | | |
| ATF6B | IL2 | IL2 low | 1388 | NM_ | NC_ | 32117995 | sense | CTCTCCTC | 1019. | CCATCTCT | 1207. | GGG | 12 | 0.7174 |
| | | | | 004381.4 | 000006.12 | | | GGATGAÅ | | CCTCGGAT | | | | |
| | | | | | | | | CAAGG | | GAACAAG | | | | |
| | | | | | | | | | | GGGGAGC | | | | |
| ATF6B | IL2 | IL2 low | 1388 | NM_ | NC_ | 32127466 | anti- | GATCGGC | 1020. | GGAAGAT | 1208. | GGG | 3 | 0.6296 |
| | | | | 004381.4 | 000006.12 | | sense | AGGAGTTC | | CGGCAGG | | | | |
| | | | | | | | | CCATG | | AGTTCCCA | | | | |
| | | | | | | | | | | TGGGGGC | | | | |
| | | | | | | | | | | T | | | | |
| GATA3 | IL2 | IL2 low | 2625 | NM_ | NC_ | 8055892 | sense | AGGTACCC | 1021. | GCAGAGG | 1209. | CGG | 2 | 0.6857 |
| | | | | 002051.2 | 000010.11 | | | TCCGACCC | | TACCCTCC | | | | |
| | | | | | | | | ACCA | | GACCCACC | | | | |
| | | | | | | | | | | ACGGTGA | | | | |
| GATA3 | IL2 | IL2 low | 2625 | NM_ | NC_ | 8064014 | sense | CAGGGAG | 1022. | AAGGCAG | 1210. | GGG | 4 | 0.737 |
| | | | | 002051.2 | 000010.11 | | | TGTGTGAA | | GGAGTGT | | | | |
| | | | | | | | | CTGTG | | GTGAACTG | | | | |
| | | | | | | | | | | TGGGGCA | | | | |
| | | | | | | | | | | A | | | | |
| GATA3 | IL2 | IL2 low | 2625 | NM_ | NC_ | 8058740 | anti- | GGAGCTG | 1023. | GTCCGGA | 1211. | AGG | 3 | 0.6273 |
| | | | | 002051.2 | 000010.11 | | sense | TACTCGGG | | GCTGTACT | | | | |
| | | | | | | | | CACGT | | CGGGCAC | | | | |
| | | | | | | | | | | GTAGGGC | | | | |
| | | | | | | | | | | G | | | | |
| GATA3 | IL2 | IL2 low | 2625 | NM_ | NC_ | 8058432 | sense | TCCAAGAC | 1024. | CTTCTCCA | 1212. | CGG | 3 | 0.7243 |
| | | | | 002051.2 | 000010.11 | | | GTCCATCC | | AGACGTCC | | | | |
| | | | | | | | | ACCA | | ATCCACCA | | | | |
| | | | | | | | | | | CGGCTC | | | | |
| IRF2 | IL2 | IL2 low | 3660 | NM_ | NC_ | 1.84E+08 | sense | ACCTGATC | 1025. | ATAAACCT | 1213. | AGG | 4 | 0.6049 |
| | | | | 002199.3 | 000004.12 | | | CCAAAACA | | GATCCCAA | | | | |
| | | | | | | | | TGGA | | AACATGG | | | | |
| | | | | | | | | | | AAGGCGA | | | | |
| IRF2 | IL2 | IL2 low | 3660 | NM_ | NC_ | 1.84E+08 | anti- | CAGCATTC | 1026. | GGGGCAG | 1214. | AGG | 4 | 0.6028 |
| | | | | 002199.3 | 000004.12 | | sense | GGTAGAC | | CATTCGGT | | | | |
| | | | | | | | | CCTGA | | AGACCCTG | | | | |
| | | | | | | | | | | AAGGCAT | | | | |
| IRF2 | IL2 | IL2 low | 3660 | NM_ | NC_ | 1.84E+08 | sense | GGATGCAT | 1027. | CCCTGGAT | 1215. | GGG | 3 | 0.6231 |
| | | | | 002199.3 | 000004.12 | | | GCGGCTA | | GCATGCG | | | | |
| | | | | | | | | GACAT | | GCTAGACA | | | | |
| | | | | | | | | | | TGGGTGG | | | | |
| IRF2 | IL2 | IL2 low | 3660 | NM_ | NC_ | 1.84E+08 | anti- | TACCTGCA | 1028. | CGCTTACC | 1216. | GGG | 7 | 0.7207 |
| | | | | 002199.3 | 000004.12 | | sense | TAGGAAG | | TGCATAGG | | | | |
| | | | | | | | | ACACG | | AAGACAC | | | | |
| | | | | | | | | | | GGGGGAG | | | | |
| NFATC2 | IL2 | IL2 low | 4773 | NM_ | NC_ | 51474071 | anti- | ACATTGGA | 1029. | ACGGACAT | 1217. | CGG | 5 | 0.7428 |
| | | | | 001258297. | 000020.11 | | sense | AGAAAGA | | TGGAAGA | | | | |
| | | | | 1 | | | | ACACG | | AAGAACA | | | | |
| | | | | | | | | | | CGCGGGT | | | | |
| | | | | | | | | | | G | | | | |
| NFATC2 | IL2 | IL2 low | 4773 | NM_ | NC_ | 51454601 | anti- | ATGTAAAG | 1030. | TCGGATGT | 1218. | AGG | 6 | 0.7057 |
| | | | | 001258297. | 000020.11 | | sense | TTCTGCCC | | AAAGTTCT | | | | |
| | | | | 1 | | | | CGTG | | GCCCCGTG | | | | |
| | | | | | | | | | | AGGATC | | | | |
| NFATC2 | IL2 | IL2 low | 4773 | NM_ | NC_ | 51523157 | sense | GCAGGGC | 1031. | GCGAGCA | 1219. | CGG | 2 | 0.6354 |
| | | | | 001258297. | 000020.11 | | | GAGAGGA | | GGGCGAG | | | | |
| | | | | 1 | | | | GAAACT | | AGGAGAA | | | | |
| | | | | | | | | | | ACTCGGCT | | | | |
| | | | | | | | | | | C | | | | |
| NFATC2 | IL2 | IL2 low | 4773 | NM_ | NC_ | 51523397 | sense | GCCGCAG | 1032. | CCTCGCCG | 1220. | TGG | 2 | 0.6587 |
| | | | | 001258297. | 000020.11 | | | CCCTCATC | | CAGCCCTC | | | | |
| | | | | 1 | | | | TCACG | | ATCTCACG | | | | |
| | | | | | | | | | | TGGCAC | | | | |
| ZEB1 | IL2 | IL2 low | 6935 | NM_ | NC_ | 31520685 | sense | AATGCTTC | 1033. | AATCAATG | 1221. | AGG | 7 | 0.7295 |
| | | | | 030751.5 | 000010.11 | | | ACCCATAC | | CTTCACCC | | | | |
| | | | | | | | | AACA | | ATACAACA | | | | |
| | | | | | | | | | | AGGTGG | | | | |
| ZEB1 | IL2 | IL2 low | 6935 | NM_ | NC_ | 31461183 | sense | CAGACCA | 1034. | CCAACAGA | 1222. | GGG | 2 | 0.6782 |
| | | | | 030751.5 | 000010.11 | | | GACAGTGT | | CCAGACA | | | | |
| | | | | | | | | TACCA | | GTGTTACC | | | | |
| | | | | | | | | | | AGGGAGG | | | | |
| ZEB1 | IL2 | IL2 low | 6935 | NM_ | NC_ | 31520903 | sense | GAAGGAC | 1035. | CTGAGAA | 1223. | GGG | 7 | 0.669 |
| | | | | 030751.5 | 000010.11 | | | AAAAGCTT | | GGACAAA | | | | |
| | | | | | | | | TGAAG | | AGCTTTGA | | | | |
| | | | | | | | | | | AGGGGGG | | | | |
| | | | | | | | | | | G | | | | |
| ZEB1 | IL2 | IL2 low | 6935 | NM_ | NC_ | 31521504 | sense | GGTTACTT | 1036. | ACAGGGTT | 1224. | GGG | 7 | 0.66 |
| | | | | 030751.5 | 000010.11 | | | GTACACAG | | ACTTGTAC | | | | |
| | | | | | | | | CTGA | | ACAGCTGA | | | | |
| | | | | | | | | | | GGGTGC | | | | |
| PKNOX1 | IL2 | IL2 low | 5316 | NM_ | NC_ | 43013196 | sense | AACAGTG | 1037. | AATGAACA | 1225. | TGG | 5 | 0.6274 |
| | | | | 004571.4 | 000021.9 | | | AAACTCTG | | GTGAAACT | | | | |
| | | | | | | | | TTGAG | | CTGTTGAG | | | | |
| | | | | | | | | | | TGGAGA | | | | |
| PKNOX1 | IL2 | IL2 low | 5316 | NM_ | NC_ | 43016996 | sense | GGGAAAC | 1038. | AGCAGGG | 1226. | CGG | 6 | 0.6554 |
| | | | | 004571.4 | 000021.9 | | | GTAGCCAT | | AAACGTA | | | | |
| | | | | | | | | GGCGA | | GCCATGGC | | | | |
| | | | | | | | | | | GACGGTG | | | | |
| | | | | | | | | | | G | | | | |
| PKNOX1 | IL2 | IL2 low | 5316 | NM_ | NC_ | 43021368 | sense | GGTTCATC | 1039. | TGATGGTT | 1227. | GGG | 8 | 0.6957 |
| | | | | 004571.4 | 000021.9 | | | TAAGAACA | | CATCTAAG | | | | |
| | | | | | | | | AGAG | | AACAAGA | | | | |
| | | | | | | | | | | GGGGCGT | | | | |
| PKNOX1 | IL2 | IL2 low | 5316 | NM_ | NC_ | 43007550 | sense | TGCTCTGA | 1040. | AAACTGCT | 1228. | AGG | 3 | 0.583 |
| | | | | 004571.4 | 000021.9 | | | ACCCGATG | | CTGAACCC | | | | |
| | | | | | | | | CAGA | | GATGCAG | | | | |
| | | | | | | | | | | AAGGAGT | | | | |
| USP22 | IL2 | IL2 low | 23326 | NM_ | NC_ | 21015837 | sense | ACCTGGTG | 1041. | CTGCACCT | 1229. | AGG | 6 | 0.6275 |
| | | | | 015276.1 | 000017.11 | | | TGGACCCA | | GGTGTGG | | | | |
| | | | | | | | | CGCG | | ACCCACGC | | | | |
| | | | | | | | | | | GAGGCAC | | | | |
| USP22 | IL2 | IL2 low | 23326 | NM_ | NC_ | 21019085 | sense | CCTCGAAC | 1042. | ATCACCTC | 1230. | GGG | 4 | 0.6518 |
| | | | | 015276.1 | 000017.11 | | | TGCACCAT | | GAACTGCA | | | | |
| | | | | | | | | AGGT | | CCATAGGT | | | | |
| | | | | | | | | | | GGGTGG | | | | |
| USP22 | IL2 | IL2 low | 23326 | NM_ | NC_ | 21021211 | sense | GCCATTGA | 1043. | CTCAGCCA | 1231. | AGG | 3 | 0.6813 |
| | | | | 015276.1 | 000017.11 | | | TCTGATGT | | TTGATCTG | | | | |
| | | | | | | | | ACGG | | ATGTACGG | | | | |
| | | | | | | | | | | AGGCAT | | | | |
| USP22 | IL2 | IL2 low | 23326 | NM_ | NC_ | 21018000 | anti- | TGGGGCT | 1044. | GAGCTGG | 1232. | CGG | 5 | 0.6752 |
| | | | | 601527.1 | 700001.11 | | sense | CTGCATCT | | GGCTCTGC | | | | |
| | | | | | | | | CACAG | | ATCTCACA | | | | |
| | | | | | | | | | | GCGGTGC | | | | |
| ZBTB11 | IL2 | IL2 low | 27107 | NM_ | NC_ | 1.02E+08 | anti- | AATAAGAT | 1045. | GACGAAT | 1233. | AGG | 6 | 0.6273 |
| | | | | 501441.3 | 000003.12 | | sense | GTGCTCGC | | AAGATGT | | | | |
| | | | | | | | | AAAG | | GCTCGCAA | | | | |
| | | | | | | | | | | AGAGGCA | | | | |
| | | | | | | | | | | C | | | | |
| ZBTB11 | IL2 | IL2 low | 27107 | NM_ | NC_ | 1.02E+08 | sense | CAGGACTT | 1046. | CACCCAGG | 1234. | TGG | 4 | 0.605 |
| | | | | 014415.3 | 000003.12 | | | ACGAGTAC | | ACTTACGA | | | | |
| | | | | | | | | AGAA | | GTACAGA | | | | |
| | | | | | | | | | | ATGGAGG | | | | |
| ZBTB11 | IL2 | IL2 low | 27107 | NM_ | NC_ | 1.02E+08 | sense | GGCATATA | 1047. | AAGGGGC | 1235. | AGG | 4 | 0.5992 |
| | | | | 014415.3 | 000003.12 | | | TTCGACTA | | ATATATTC | | | | |
| | | | | | | | | CACA | | GACTACAC | | | | |
| | | | | | | | | | | AAGGGAA | | | | |
| ZBTB11 | IL2 | IL2 low | 27107 | NM_ | NC_ | 1.02E+08 | anti- | TATACATC | 1048. | CAGCTATA | 1236. | GGG | 4 | 0.6653 |
| | | | | 014415.3 | 000003.12 | | sense | CTACTGAT | | CATCCTAC | | | | |
| | | | | | | | | GACA | | TGATGACA | | | | |
| | | | | | | | | | | GGGCAG | | | | |
| TBP | IL2 | IL2 low | 6908 | NM_ | NC_ | 1.71E+08 | sense | ACGTCCCA | 1049. | GTCAACGT | 1237. | GGG | 3 | 0.6765 |
| | | | | 003194.4 | 000006.12 | | | GCAGGCA | | CCCAGCAG | | | | |
| | | | | | | | | ACACA | | GCAACACA | | | | |
| | | | | | | | | | | GGGAAC | | | | |
| TBP | IL2 | IL2 low | 6908 | NM_ | NC_ | 1.71E+08 | sense | CCAATGAT | 1050. | TAGTCCAA | 1238. | TGG | 3 | 0.4983 |
| | | | | 003194.4 | 000006.12 | | | GCCTTATG | | TGATGCCT | | | | |
| | | | | | | | | GCAC | | TATGGCAC | | | | |
| | | | | | | | | | | TGGACT | | | | |
| TBP | IL2 | IL2 low | 6908 | NM_ | NC_ | 1.71E+08 | sense | GATAAGA | 1051. | TGAGGAT | 1239. | CGG | 5 | 0.6043 |
| | | | | 003194.4 | 000006.12 | | | GAGCCAC | | AAGAGAG | | | | |
| | | | | | | | | GAACCA | | CCACGAAC | | | | |
| | | | | | | | | | | CACGGCAC | | | | |
| TBP | IL2 | IL2 low | 6908 | NM_ | NC_ | 1.71E+08 | anti- | GTTTCGGG | 1052. | CGGCGTTT | 1240. | TGG | 4 | 0.5851 |
| | | | | 003194.4 | 000006.12 | | sense | CACGAAGT | | CGGGCAC | | | | |
| | | | | | | | | GCAA | | GAAGTGC | | | | |
| | | | | | | | | | | AATGGTCT | | | | |
| JAK3 | IL2 | IL2 low | 3718 | NM_ | NC_ | 17835098 | anti- | ACTCTCCA | 1053. | ACTTACTC | 1241. | CGG | 15 | 0.7301 |
| | | | | 000215.3 | 000019.10 | | sense | GGCTTAAC | | TCCAGGCT | | | | |
| | | | | | | | | ACAG | | TAACACAG | | | | |
| | | | | | | | | | | CGGGGC | | | | |
| JAK3 | IL2 | IL2 low | 3718 | NM_ | NC_ | 17839577 | anti- | AGCTCTCG | 1054. | CAGGAGC | 1242. | GGG | 10 | 0.7109 |
| | | | | 000215.3 | 000019.10 | | sense | AAGACTGC | | TCTCGAAG | | | | |
| | | | | | | | | TGTG | | ACTGCTGT | | | | |
| | | | | | | | | | | GGGGTCG | | | | |
| JAK3 | IL2 | IL2 low | 3718 | NM_ | NC_ | 17836043 | anti- | GTGTACAA | 1055. | CCAGGTGT | 1243. | TGG | 14 | 0.6764 |
| | | | | 000215.3 | 000019.10 | | sense | ATTCCTGC | | ACAAATTC | | | | |
| | | | | | | | | ACCA | | CTGCACCA | | | | |
| | | | | | | | | | | TGGTGC | | | | |
| JAK3 | IL2 | IL2 low | 3718 | NM_ | NC_ | 17842538 | sense | TGACGCG | 1056. | TTCGTGAC | 1244. | AGG | 6 | 0.6476 |
| | | | | 500021.3 | 000019.10 | | | GAGGCGT | | GCGGAGG | | | | |
| | | | | | | | | ATTCGG | | CGTATTCG | | | | |
| | | | | | | | | | | GAGGACG | | | | |
| PRRC2A | IL2 | IL2 low | 7916 | NM_ | NC_ | 31631224 | anti- | AGAGGAA | 1057. | CTCCAGAG | 1245. | GGG | 16 | 0.6995 |
| | | | | 080686.2 | 000006.12 | | sense | AGCGAGA | | GAAAGCG | | | | |
| | | | | | | | | GATTGG | | AGAGATT | | | | |
| | | | | | | | | | | GGGGGCC | | | | |
| | | | | | | | | | | C | | | | |
| PRRC2A | IL2 | IL2 low | 7916 | NM_ | NC_ | 31632445 | sense | ATAAACCG | 1058. | CAGGATA | 1246. | AGG | 16 | 0.6561 |
| | | | | 608068.2 | 000006.12 | | | CCTCGTTT | | AACCGCCT | | | | |
| | | | | | | | | CCGG | | CGTTTCCG | | | | |
| | | | | | | | | | | GAGGCTG | | | | |
| PRRC2A | IL2 | IL2 low | 7916 | NM_ | NC_ | 31629740 | anti- | CGGGGAT | 1059. | CCATCGGG | 1247. | GGG | 14 | 0.6731 |
| | | | | 080686.2 | 000006.12 | | sense | CAAAGTTC | | GATCAAA | | | | |
| | | | | | | | | ATTGG | | GTTCATTG | | | | |
| | | | | | | | | | | GGGGCAT | | | | |
| PRRC2A | IL2 | IL2 low | 7916 | NM_ | NC_ | 31625834 | sense | CTCCGCCC | 1060. | TTCCCTCC | 1248. | GGG | 8 | 0.721 |
| | | | | 080686.2 | 000006.12 | | | TATGGACC | | GCCCTATG | | | | |
| | | | | | | | | CCAG | | GACCCCAG | | | | |
| | | | | | | | | | | GGGCCT | | | | |
| RBPJ | IL2 | IL2 low | 3516 | NM_ | NC_ | 26415547 | sense | AAAGAAC | 1061. | AAAAAAA | 1249. | TGG | 5 | 0.6336 |
| | | | | 005349.3 | 000004.12 | | | AAATGGA | | GAACAAAT | | | | |
| | | | | | | | | ACGCGA | | GGAACGC | | | | |
| | | | | | | | | | | GATGGTT | | | | |
| | | | | | | | | | | G | | | | |
| RBPJ | IL2 | IL2 low | 3516 | NM_ | NC_ | 26386378 | anti- | CACCTAGT | 1062. | TACTCACC | 1250. | TGG | 3 | 0.6435 |
| | | | | 005349.3 | 000004.12 | | sense | AAGTOGTT | | TAGTAAGT | | | | |
| | | | | | | | | TAGG | | CGTTTAGG | | | | |
| | | | | | | | | | | TGGAGG | | | | |
| RBPJ | IL2 | IL2 low | 3516 | NM_ | NC_ | 26424454 | sense | CATGCCAG | 1063. | TTTTCATG | 1251. | GGG | 7 | 0.6844 |
| | | | | 005349.3 | 000004.12 | | | TTCACAGC | | CCAGTTCA | | | | |
| | | | | | | | | AGTG | | CAGCAGT | | | | |
| | | | | | | | | | | GGGGAGC | | | | |
| RBPJ | IL2 | IL2 low | 3516 | NM_ | NC_ | 26424363 | sense | CATTGCCT | 1064. | TATGCATT | 1252. | TGG | 7 | 0.65 |
| | | | | 005349.3 | 000004.12 | | | CAGGAAC | | GCCTCAGG | | | | |
| | | | | | | | | AAAGG | | AACAAAG | | | | |
| | | | | | | | | | | GTGGCTC | | | | |
| STAT5B | IL2 | IL2 low | 6777 | NM_ | NC_ | 42216055 | sense | CAGCCAG | 1065. | ATGGCAG | 1253. | CGG | 12 | 0.6375 |
| | | | | 012448.3 | 000017.11 | | | GACAACA | | CCAGGAC | | | | |
| | | | | | | | | ATGCGA | | AACAATGC | | | | |
| | | | | | | | | | | GACGGCC | | | | |
| | | | | | | | | | | A | | | | |
| STAT5B | IL2 | IL2 low | 6777 | NM_ | NC_ | 42227658 | anti- | GTGGCCTT | 1066. | CTGGGTG | 1254. | TGG | 3 | 0.6157 |
| | | | | 012448.3 | 000017.11 | | sense | AATGTTCT | | GCCTTAAT | | | | |
| | | | | | | | | CCTG | | GTTCTCCT | | | | |
| | | | | | | | | | | GTGGATT | | | | |
| STAT5B | IL2 | IL2 low | 6777 | NM_ | NC_ | 42224822 | anti- | GTTCATTG | 1067. | CTCTGTTC | 1255. | CGG | 4 | 0.6583 |
| | | | | 012448.3 | 000017.11 | | sense | TACAATAT | | ATTGTACA | | | | |
| | | | | | | | | ATGG | | ATATATGG | | | | |
| | | | | | | | | | | CGGATG | | | | |
| STAT5B | IL2 | IL2 low | 6777 | NM_ | NC_ | 42217252 | sense | TAAGAGG | 1068. | GAATTAAG | 1256. | GGG | 11 | 0.7097 |
| | | | | 012448.3 | 000017.11 | | | TCAGACCG | | AGGTCAG | | | | |
| | | | | | | | | TCGTG | | ACCGTCGT | | | | |
| | | | | | | | | | | GGGGCAG | | | | |
| PRKRIR | IL2 | IL2 low | 5612 | NM_ | NC_ | 76351762 | sense | AGATGGA | 1069. | TATTAGAT | 1257. | TGG | 5 | 0.5452 |
| | | | | 004705.3 | 000011.10 | | | ATAACTAT | | GGAATAA | | | | |
| | | | | | | | | ATAGC | | CTATATAG | | | | |
| | | | | | | | | | | CTGGCCG | | | | |
| PRKRIR | IL2 | IL2 low | 5612 | NM_ | NC_ | 76352722 | sense | CAGAACCC | 1070. | TGCTCAGA | 1258. | GGG | 5 | 0.6252 |
| | | | | 004705.3 | 000011.10 | | | CAGCGAA | | ACCCCAGC | | | | |
| | | | | | | | | GAAGA | | GAAGAAG | | | | |
| | | | | | | | | | | AGGGTGA | | | | |
| PRKRIR | IL2 | IL2 low | 5612 | NM_ | NC_ | 76352601 | anti- | TCAGCCTC | 1071. | TTCATCAG | 1259. | AGG | 5 | 0.6814 |
| | | | | 004705.3 | 000011.10 | | sense | ATGTCCAT | | CCTCATGT | | | | |
| | | | | | | | | CCAG | | CCATCCAG | | | | |
| | | | | | | | | | | AGGTAT | | | | |
| PRKRIR | IL2 | IL2 low | 5612 | NM_ | NC_ | 76352282 | sense | TGAATCTC | 1072. | TTGATGAA | 1260. | AGG | 5 | 0.6598 |
| | | | | 500470.3 | 000011.10 | | | ATAACCTA | | TCTCATAA | | | | |
| | | | | | | | | AGAG | | CCTAAGAG | | | | |
| | | | | | | | | | | AGGAAT | | | | |
| CDC5L | IL2 | IL2 low | 988 | NM_ | NC_ | 44408511 | sense | AATTGCAC | 1073. | GTGAAATT | 1261. | AGG | 8 | 0.6775 |
| | | | | 001253.3 | 000006.12 | | | GTCAAACT | | GCACGTCA | | | | |
| | | | | | | | | GCCG | | AACTGCCG | | | | |
| | | | | | | | | | | AGGAAT | | | | |
| CDC5L | IL2 | IL2 low | 988 | NM_ | NC_ | 44392761 | sense | AGTTGATG | 1074. | GCCAAGTT | 1262. | AGG | 3 | 0.6555 |
| | | | | 001253.3 | 000006.12 | | | CCAACTCA | | GATGCCAA | | | | |
| | | | | | | | | GTGG | | CTCAGTGG | | | | |
| | | | | | | | | | | AGGACC | | | | |
| CDCSL | IL2 | IL2 low | 988 | NM_ | NC_ | 44393543 | sense | ATCCAGAA | 1075. | CCAAATCC | 1263. | CGG | 4 | 0.7584 |
| | | | | 001253.3 | 000006.12 | | | ACAAAACC | | AGAAACA | | | | |
| | | | | | | | | AGCG | | AAACCAGC | | | | |
| | | | | | | | | | | GCGGCCT | | | | |
| CDC5L | IL2 | IL2 low | 988 | NM_ | NC_ | 44419516 | anti- | GAAGTCAC | 1076. | CTGAGAA | 1264. | GGG | 9 | 0.742 |
| | | | | 001253.3 | 000006.12 | | sense | TCTCATGC | | GTCACTCT | | | | |
| | | | | | | | | AATG | | CATGCAAT | | | | |
| | | | | | | | | | | GGGGTAT | | | | |
| TERF2 | IL2 | IL2 low | 7014 | NM_ | NC_ | 69370578 | anti- | AAAGTTCT | 1077. | ATGAAAA | 1265. | GGG | 5 | 0.6289 |
| | | | | 005652.4 | 000016.10 | | sense | GGATAAC | | GTTCTGGA | | | | |
| | | | | | | | | AGGAT | | TAACAGG | | | | |
| | | | | | | | | | | ATGGGCC | | | | |
| | | | | | | | | | | A | | | | |
| TERF2 | IL2 | IL2 low | 7014 | NM_ | NC_ | 69385848 | sense | CGCGCGG | 1078. | AGGGCGC | 1266. | TGG | 1 | 0.6198 |
| | | | | 005652.4 | 000016.10 | | | CGATCGG | | GCGGCGA | | | | |
| | | | | | | | | ACACGA | | TCGGACAC | | | | |
| | | | | | | | | | | GATGGCG | | | | |
| | | | | | | | | | | G | | | | |
| TERF2 | IL2 | IL2 low | 7014 | NM_ | NC_ | 69385419 | sense | GGGTTAT | 1079. | CTGCGGG | 1267. | CGG | 2 | 0.6807 |
| | | | | 005652.4 | 000016.10 | | | GCAGTGTC | | TTATGCAG | | | | |
| | | | | | | | | TGTCG | | TGTCTGTC | | | | |
| | | | | | | | | | | GCGGATT | | | | |
| TERF2 | IL2 | IL2 low | 7014 | NM_ | NC_ | 69385628 | anti- | TCTGTCTG | 1080. | CGGATCTG | 1268. | CGG | 1 | 0.6089 |
| | | | | 005652.4 | 000016.10 | | sense | AAGTCCCC | | TCTGAAGT | | | | |
| | | | | | | | | GTAC | | CCCCGTAC | | | | |
| | | | | | | | | | | CGGCTA | | | | |
| PBX2 | IL2 | IL2 low | 5089 | NM_ | NC_ | 32188361 | anti- | AGGGGAC | 1081. | TGTCAGG | 1269. | AGG | 3 | 0.6149 |
| | | | | 002586.4 | 000006.12 | | sense | ACACCACC | | GGACACA | | | | |
| | | | | | | | | ACCAG | | CCACCACC | | | | |
| | | | | | | | | | | AGAGGCT | | | | |
| | | | | | | | | | | G | | | | |
| PBX2 | IL2 | IL2 low | 5089 | NM_ | NC_ | 32188279 | anti- | CATACTTC | 1082. | TGCTCATA | 1270. | TGG | 3 | 0.7077 |
| | | | | 002586.4 | 000006.12 | | sense | TCCAGCTC | | CTTCTCCA | | | | |
| | | | | | | | | CGAG | | GCTCCGAG | | | | |
| | | | | | | | | | | TGGTAT | | | | |
| PBX2 | IL2 | IL2 low | 5089 | NM_ | NC_ | 32189820 | anti- | CCGGGGT | 1083. | CCCACCGG | 1271. | AGG | 1 | 0.6787 |
| | | | | 002586.4 | 000006.12 | | sense | CTCCGCCA | | GGTCTCCG | | | | |
| | | | | | | | | CCGGG | | CCACCGG | | | | |
| | | | | | | | | | | GAGGCTC | | | | |
| PBX2 | IL2 | IL2 low | 5089 | NM_ | NC_ | 32187751 | sense | CTTCAGCA | 1084. | GTAACTTC | 1272. | AGG | 5 | 0.6791 |
| | | | | 002586.4 | 000006.12 | | | AACAGGC | | AGCAAAC | | | | |
| | | | | | | | | CACTG | | AGGCCACT | | | | |
| | | | | | | | | | | GAGGTCC | | | | |
| CIC | IL2 | IL2 low | 23152 | NM_ | NC_ | 42291060 | sense | ACTGTCAC | 1085. | TGCCACTG | 1273. | GGG | 10 | 0.6591 |
| | | | | 015125.4 | 000019.10 | | | TAACCTAC | | TCACTAAC | | | | |
| | | | | | | | | TGGT | | CTACTGGT | | | | |
| | | | | | | | | | | GGGCAC | | | | |
| CIC | IL2 | IL2 low | 23152 | NM_ | NC_ | 42292311 | anti- | CCCGCCCG | 1086. | CGTGCCCG | 1274. | AGG | 13 | 0.6689 |
| | | | | 015125.4 | 000019.10 | | sense | CTGACTGC | | CCCGCTGA | | | | |
| | | | | | | | | ACAT | | CTGCACAT | | | | |
| | | | | | | | | | | AGGTGA | | | | |
| CIC | IL2 | IL2 low | 23152 | NM_ | NC_ | 42287372 | sense | CTCTACCG | 1087. | TTGCCTCT | 1275. | CGG | 4 | 0.6842 |
| | | | | 015125.4 | 000019.10 | | | CCCGGAA | | ACCGCCCG | | | | |
| | | | | | | | | AACGT | | GAAAACG | | | | |
| | | | | | | | | | | TCGGACC | | | | |
| CIC | IL2 | IL2 low | 23152 | NM_ | NC_ | 42289198 | anti- | TTGGGCCA | 1088. | GGCTTTGG | 1276. | GGG | 8 | 0.6248 |
| | | | | 015125.4 | 000019.10 | | sense | GAGTACG | | GCCAGAG | | | | |
| | | | | | | | | ATGCA | | TACGATGC | | | | |
| | | | | | | | | | | AGGGCCA | | | | |
| SS18 | IL2 | IL2 low | 6760 | NM_ | NC_ | 26052686 | sense | AATCAGAT | 1089. | ACAGAATC | 1277. | GGG | 5 | 0.6566 |
| | | | | 001007559. | 000018.10 | | | GACAATG | | AGATGAC | | | | |
| | | | | 1 | | | | AGTCA | | AATGAGTC | | | | |
| | | | | | | | | | | AGGGACA | | | | |
| SS18 | IL2 | IL2 low | 6760 | NM_ | NC_ | 26039408 | sense | CAATACAA | 1090. | TCAGCAAT | 1278. | AGG | 6 | 0.7278 |
| | | | | 001007559. | 000018.10 | | | TATGCCAC | | ACAATATG | | | | |
| | | | | 1 | | | | AGGG | | CCACAGG | | | | |
| | | | | | | | | | | GAGGCGG | | | | |
| SS18 | IL2 | IL2 low | 6760 | NM_ | NC_ | 26052827 | sense | CCTAACCA | 1091. | AGGGCCT | 1279. | GGG | 5 | 0.6709 |
| | | | | 001007559. | 000018.10 | | | TATGCCTA | | AACCATAT | | | | |
| | | | | 1 | | | | TGCA | | GCCTATGC | | | | |
| | | | | | | | | | | AGGGACC | | | | |
| SS18 | IL2 | IL2 low | 6760 | NM_ | NC_ | 26057677 | anti- | GGCATGTT | 1092. | TGAAGGC | 1280. | AGG | 4 | 0.7849 |
| | | | | 001007559. | 000018.10 | | sense | GTGAGAG | | ATGTTGTG | | | | |
| | | | | 1 | | | | CGTGG | | AGAGCGT | | | | |
| | | | | | | | | | | GGAGGTG | | | | |
| | | | | | | | | | | G | | | | |
| HMGA1 | IL2 | IL2 low | 3159 | NM_ | NC_ | 34240847 | sense | AAAAGGA | 1093. | CAGGAAA | 1281. | CGG | 3 | 0.555 |
| | | | | 145899.2 | 000006.12 | | | CGGCACTG | | AGGACGG | | | | |
| | | | | | | | | AGAAG | | CACTGAGA | | | | |
| | | | | | | | | | | AGCGGGG | | | | |
| | | | | | | | | | | C | | | | |
| HMGA1 | IL2 | IL2 low | 3159 | NM_ | NC_ | 34240914 | sense | AGCGCTG | 1094. | GGACAGC | 1282. | TGG | 3 | 0.5867 |
| | | | | 145899.2 | 000006.12 | | | GTAGGGA | | GCTGGTA | | | | |
| | | | | | | | | GTCAGG | | GGGAGTC | | | | |
| | | | | | | | | | | AGGTGGG | | | | |
| | | | | | | | | | | TG | | | | |
| HMGA1 | IL2 | IL2 low | 3159 | NM_ | NC_ | 34242747 | sense | CCAACACC | 1095. | AGTGCCAA | 1283. | GGG | 4 | 0.7288 |
| | | | | 145899.2 | 000006.12 | | | TAAGAGA | | CACCTAAG | | | | |
| | | | | | | | | CCTCG | | AGACCTCG | | | | |
| | | | | | | | | | | GGGCCG | | | | |
| HMGA1 | IL2 | IL2 low | 3159 | NM_ | NC_ | 34240883 | anti- | GCTGTCCC | 1096. | CAGCGCTG | 1284. | AGG | 3 | 0.6102 |
| | | | | 145899.2 | 000006.12 | | sense | GGGACTC | | TCCCGGGA | | | | |
| | | | | | | | | ACCGG | | CTCACCGG | | | | |
| | | | | | | | | | | AGGCTG | | | | |
| DUX4 | IL2 | IL2 low | 1E+08 | NM_ | NC_ | 1.9E+08 | sense | ACACCGGC | 1097. | GCCCACAC | 1285. | GGG | 1 | 0.5159 |
| | | | | 001293798. | 000004.12 | | | GCGTGGG | | CGGCGCG | | | | |
| | | | | 1 | | | | GAACG | | TGGGGAA | | | | |
| | | | | | | | | | | CGGGGCT | | | | |
| | | | | | | | | | | T | | | | |
| DUX4 | IL2 | IL2 low | 1E+08 | NM_ | NC_ | 1.9E+08 | sense | GGCAGGC | 1098. | CGCAGGC | 1286. | CGG | 1 | 0.617 |
| | | | | 001293798. | 000004.12 | | | GGCCTGT | | AGGCGGC | | | | |
| | | | | 1 | | | | GCAGCG | | CTGTGCAG | | | | |
| | | | | | | | | | | CGCGGCCC | | | | |
| DUX4 | IL2 | IL2 low | 1E+08 | NM_ | NC_ | 1.9E+08 | sense | GGGGATC | 1099. | CAGAGGG | 1287. | CGG | 1 | 0.5181 |
| | | | | 001293798. | 000004.12 | | | TCCCAACC | | GATCTCCC | | | | |
| | | | | 1 | | | | TGCCC | | AACCTGCC | | | | |
| | | | | | | | | | | CCGGCGC | | | | |
| DUX4 | IL2 | IL2 low | 1E+08 | NM_ | NC_ | 1.9E+08 | sense | TCCAGGCA | 1100. | GCTTTCCA | 1288. | AGG | 1 | 0.556 |
| | | | | 001293798. | 000004.12 | | | TCGCCGCC | | GGCATCGC | | | | |
| | | | | 1 | | | | CGGG | | CGCCCGG | | | | |
| | | | | | | | | | | GAGGAGC | | | | |

TABLE 7
Nuclear factors that can be inhibited to increase IL2RA
expression or overexpressed to decrease IL2RA expression

| | | | | | | Position | | | | | | | | |
|---|---|---|---|---|---|---|---|---|---|---|---|---|---|---|
| | | | Target | | | of Base | | sgRNA | SEQ | Target | SEQ | | | Rule |
| gene_ | screen_ | screen_ | Gene | Target | Genomic | After Cut | | Target | ID | Context | ID | PAM | Exon | Set 2 |
| id | target | direction | ID | Transcript | Sequence | (1-based) | Strand | Sequence | NO: | Sequence | NO: | Sequence | Number | score |
| CTCF | IL2RA | IL2RA high | 10664 | NM_006565.3 | NC_000016.10 | 67612001 | antisense | CGATCCAA | 1289. | GTGACGAT | 1381. | TGG | 4 | 0.6364 |
| | | | | | | | | ATTTGAAC | | CCAAATTT | | | | |
| | | | | | | | | GCCG | | GAACGCC | | | | |
| | | | | | | | | | | GTGGACA | | | | |
| CTCF | IL2RA | IL2RA high | 10664 | NM_006565.3 | NC_000016.10 | 67611476 | sense | GAGCAAA | 1290. | AAAAGAG | 1382. | AGG | 3 | 0.6793 |
| | | | | | | | | CTGCGTTA | | CAAACTGC | | | | |
| | | | | | | | | TACAG | | GTTATACA | | | | |
| | | | | | | | | | | GAGGAGG | | | | |
| CTCF | IL2RA | IL2RA high | 10664 | NM_006565.3 | NC_000016.10 | 67610967 | sense | TTACCCCA | 1291. | CCACTTAC | 1383. | TGG | 3 | 0.6378 |
| | | | | | | | | GAACCAG | | CCCAGAAC | | | | |
| | | | | | | | | ACGGA | | CAGACGG | | | | |
| | | | | | | | | | | ATGGGGG | | | | |
| CTCF | IL2RA | IL2RA high | 10664 | NM_006565.3 | NC_000016.10 | 67620773 | sense | TTTGTGCA | 1292. | GCAGTTTG | 1384. | GGG | 6 | 0.6444 |
| | | | | | | | | GTTATGCC | | TGCAGTTA | | | | |
| | | | | | | | | AGCA | | TGCCAGCA | | | | |
| | | | | | | | | | | GGGACA | | | | |
| PTPRC | IL2RA | IL2RA high | 5788 | NM_002838.4 | NC_000001.11 | 1.99E+08 | antisense | AGCATTAT | 1293. | CACTAGCA | 1385. | GGG | 4 | 0.6692 |
| | | | | | | | | CCAAAGA | | TTATCCAA | | | | |
| | | | | | | | | GTCCG | | AGAGTCC | | | | |
| | | | | | | | | | | GGGGATA | | | | |
| PTPRC | IL2RA | IL2RA high | 5788 | NM_002838.4 | NC_000001.11 | 1.99E+08 | antisense | GGAAACTT | 1294. | TATAGGAA | 1386. | CGG | 19 | 0.6482 |
| | | | | | | | | GCTGAACA | | ACTTGCTG | | | | |
| | | | | | | | | CCCG | | AACACCCG | | | | |
| | | | | | | | | | | CGGGAT | | | | |
| PTPRC | IL2RA | IL2RA high | 5788 | NM_002838.4 | NC_000001.11 | 1.99E+08 | antisense | TCCAAATG | 1295. | AACTTCCA | 1387. | GGG | 14 | 0.6167 |
| | | | | | | | | GTAACGTT | | AATGGTAA | | | | |
| | | | | | | | | CATG | | CGTTCATG | | | | |
| | | | | | | | | | | GGGGCC | | | | |
| PTPRC | IL2RA | IL2RA high | 5788 | NM_002838.4 | NC_000001.11 | 1.99E+08 | sense | TGTGGATT | 1296. | TCACTGTG | 1388. | AGG | 9 | 0.6937 |
| | | | | | | | | ACTTATAT | | GATTACTT | | | | |
| | | | | | | | | AACA | | ATATAACA | | | | |
| | | | | | | | | | | AGGAAA | | | | |
| NR2C2 | IL2RA | IL2RA high | 7182 | NM_003298.4 | NC_000003.12 | 15030406 | sense | CCAGTCGA | 1297. | GAGACCA | 1389. | AGG | 10 | 0.6976 |
| | | | | | | | | CACCCATC | | GTCGACAC | | | | |
| | | | | | | | | ATTG | | CCATCATT | | | | |
| | | | | | | | | | | GAGGTTG | | | | |
| NR2C2 | IL2RA | IL2RA high | 7182 | NM_003298.4 | NC_000003.12 | 15016174 | antisense | CCCCAGTA | 1298. | TCTTCCCC | 1390. | AGG | 5 | 0.7308 |
| | | | | | | | | AACGCTCC | | AGTAAAC | | | | |
| | | | | | | | | ACAG | | GCTCCACA | | | | |
| | | | | | | | | | | GAGGCAG | | | | |
| NR2C2 | IL2RA | IL2RA high | 7182 | NM_003298.4 | NC_000003.12 | 15024201 | antisense | GAACGTCA | 1299. | TAGAGAA | 1391. | TGG | 8 | 0.6168 |
| | | | | | | | | CCTTAGAA | | CGTCACCT | | | | |
| | | | | | | | | TCCG | | TAGAATCC | | | | |
| | | | | | | | | | | GTGGCCA | | | | |
| NR2C2 | IL2RA | IL2RA high | 7182 | NM_003298.4 | NC_000003.12 | 15023322 | antisense | TCTTTGTC | 1300. | TCCATCTT | 1392 | GGG | 7 | 0.6618 |
| | | | | | | | | TGCCACAA | | TGTCTGCC | | | | |
| | | | | | | | | ACGT | | ACAAACGT | | | | |
| | | | | | | | | | | GGGAGT | | | | |
| TP53 | IL2RA | IL2RA high | 7157 | NM_000546.5 | NC_000017.11 | 7676227 | antisense | CCATTGTT | 1301. | TGAACCAT | 1393. | GGG | 4 | 0.6899 |
| | | | | | | | | CAATATCG | | TGTTCAAT | | | | |
| | | | | | | | | TCCG | | ATCGTCCG | | | | |
| | | | | | | | | | | GGGACA | | | | |
| TP53 | IL2RA | IL2RA high | 7157 | NM_000546.5 | NC_000017.11 | 7675058 | sense | GAGCGCT | 1302. | CCATGAGC | 1394. | TGG | 5 | 0.6542 |
| | | | | | | | | GCTCAGAT | | GCTGCTCA | | | | |
| | | | | | | | | AGCGA | | GATAGCG | | | | |
| | | | | | | | | | | ATGGTGA | | | | |
| TP53 | IL2RA | IL2RA high | 7157 | NM_000546.5 | NC_000017.11 | 7676527 | antisense | GATCCACT | 1303. | AATGGATC | 1395. | AGG | 2 | 0.6108 |
| | | | | | | | | CACAGTTT | | CACTCACA | | | | |
| | | | | | | | | CCAT | | GTTTCCAT | | | | |
| | | | | | | | | | | AGGTCT | | | | |
| TP53 | IL2RA | IL2RA high | 7157 | NM_000546.5 | NC_000017.11 | 7674864 | sense | GGTGCCCT | 1304. | TGGTGGT | 1396. | AGG | 6 | 0.6259 |
| | | | | | | | | ATGAGCC | | GCCCTATG | | | | |
| | | | | | | | | GCCTG | | AGCCGCCT | | | | |
| | | | | | | | | | | GAGGTCT | | | | |
| ATXN7L3 | IL2RA | IL2RA high | 56970 | NM_001098833.1 | NC_000017.11 | 44197610 | sense | CACGGACC | 1305. | ACGACAC | 1397. | AGG | 2 | 0.6328 |
| | | | | | | | | CTGATAGC | | GGACCCTG | | | | |
| | | | | | | | | ATGA | | ATAGCATG | | | | |
| | | | | | | | | | | AAGGATT | | | | |
| ATXN7L3 | IL2RA | IL2RA high | 56970 | NM_001098833.1 | NC_000017.11 | 44197712 | sense | CATCGCTC | 1306. | AGGCCATC | 1398. | CGG | 2 | 0.7491 |
| | | | | | | | | AGGAGAT | | GCTCAGG | | | | |
| | | | | | | | | ATACG | | AGATATAC | | | | |
| | | | | | | | | | | GCGGACC | | | | |
| ATXN7L3 | IL2RA | IL2RA high | 56970 | NM_001098833.1 | NC_000017.11 | 44197233 | sense | GCAGCCG | 1307. | AACAGCA | 1399. | CGG | 3 | 0.6135 |
| | | | | | | | | AATCGCCA | | GCCGAATC | | | | |
| | | | | | | | | ACCGC | | GCCAACCG | | | | |
| | | | | | | | | | | CCGGTGA | | | | |
| ATXN7L3 | IL2RA | IL2RA high | 56970 | NM_001098833.1 | NC_000017.11 | 44195424 | sense | GCTTCGCA | 1308. | AGGAGCTT | 1400. | CGG | 8 | 0.6566 |
| | | | | | | | | GCCTGCTA | | CGCAGCCT | | | | |
| | | | | | | | | ACCA | | GCTAACCA | | | | |
| | | | | | | | | | | CGGTGA | | | | |
| TFDP1 | IL2RA | IL2RA high | 7027 | NM_007111.4 | NC_000013.11 | 1.14E+08 | sense | ACCGGCA | 1309. | AGAGACC | 1401. | TGG | 5 | 0.6315 |
| | | | | | | | | GCGTCAAA | | GGCAGCG | | | | |
| | | | | | | | | CACCC | | TCAAACAC | | | | |
| | | | | | | | | | | CCTGGTG | | | | |
| | | | | | | | | | | G | | | | |
| TFDP1 | IL2RA | IL2RA high | 7027 | NM_007111.4 | NC_000013.11 | 1.14E+08 | sense | ATGACCAG | 1310. | GCTTATGA | 1402. | CGG | 7 | 0.6204 |
| | | | | | | | | AAAAACAT | | CCAGAAA | | | | |
| | | | | | | | | AAGA | | AACATAAG | | | | |
| | | | | | | | | | | ACGGCGC | | | | |
| TFDP1 | IL2RA | IL2RA high | 7027 | NM_007111.4 | NC_000013.11 | 1.14E+08 | antisense | CCTTCATG | 1311. | CAGACCTT | 1403. | AGG | 6 | 0.6851 |
| | | | | | | | | GAGAAAT | | CATGGAG | | | | |
| | | | | | | | | GCCGT | | AAATGCCG | | | | |
| | | | | | | | | | | TAGGCCC | | | | |
| TFDP1 | IL2RA | IL2RA high | 7027 | NM_007111.4 | NC_000013.11 | 1.14E+08 | sense | GGTGCAG | 1312. | ACCTGGTG | 1404. | CGG | 9 | 0.6402 |
| | | | | | | | | AGAAACC | | CAGAGAA | | | | |
| | | | | | | | | GGCATG | | ACCGGCAT | | | | |
| | | | | | | | | | | GCGGAGC | | | | |
| HNRNPK | IL2RA | IL2RA high | 3190 | NM_002140.3 | NC_000009.12 | 83972098 | sense | ATGATGTT | 1313. | TACAATGA | 1405. | CGG | 11 | 0.7754 |
| | | | | | | | | TGATGACC | | TGTTTGAT | | | | |
| | | | | | | | | GTCG | | GACCGTCG | | | | |
| | | | | | | | | | | CGGACG | | | | |
| HNRNPK | IL2RA | IL2RA high | 3190 | NM_002140.3 | NC_000009.12 | 83975465 | antisense | CTGTTGGG | 1314. | TAAACTGT | 1406. | GGG | 6 | 0.6273 |
| | | | | | | | | ACATACCG | | TGGGACAT | | | | |
| | | | | | | | | CTCG | | ACCGCTCG | | | | |
| | | | | | | | | | | GGGCCA | | | | |
| HNRNPK | IL2RA | IL2RA high | 3190 | NM_002140.3 | NC_000009.12 | 83971978 | sense | GATGATAT | 1315. | TTATGATG | 1407. | AGG | 11 | 0.7149 |
| | | | | | | | | GAGCCCTC | | ATATGAGC | | | | |
| | | | | | | | | GTCG | | CCTCGTCG | | | | |
| | | | | | | | | | | AGGACC | | | | |
| HNRNPK | IL2RA | IL2RA high | 3190 | NM_002140.3 | NC_000009.12 | 83973291 | sense | TAAAATCA | 1316. | GTGCTAAA | 1408. | AGG | 9 | 0.6608 |
| | | | | | | | | AAGAACTT | | ATCAAAGA | | | | |
| | | | | | | | | CGAG | | ACTTCGAG | | | | |
| | | | | | | | | | | AGGTAA | | | | |
| NFKB2 | IL2RA | IL2RA high | 4791 | NM_001077494.3 | NC_000010.11 | 1.02E+08 | sense | ACTCGACT | 1317. | CCCTACTC | 1409. | CGG | 14 | 0.7089 |
| | | | | | | | | ACGGCGTC | | GACTACG | | | | |
| | | | | | | | | ACCG | | GCGTCACC | | | | |
| | | | | | | | | | | GCGGACG | | | | |
| NFKB2 | IL2RA | IL2RA high | 4791 | NM_001077494.3 | NC_000010.11 | 1.02E+08 | sense | CCCACTCC | 1318. | ATATCCCA | 1410. | GGG | 9 | 0.6913 |
| | | | | | | | | ATAGAATC | | CTCCATAG | | | | |
| | | | | | | | | TCCG | | AATCTCCG | | | | |
| | | | | | | | | | | GGGGCA | | | | |
| NFKB2 | IL2RA | IL2RA high | 4791 | NM_001077494.3 | NC_000010.11 | 1.02E+08 | sense | CTGCAACT | 1319. | GTTTCTGC | 1411. | AGG | 11 | 0.6401 |
| | | | | | | | | GAAACGC | | AACTGAAA | | | | |
| | | | | | | | | AAGCG | | CGCAAGC | | | | |
| | | | | | | | | | | GAGGAGG | | | | |
| NFKB2 | IL2RA | IL2RA high | 4791 | NM_001077494.3 | NC_000010.11 | 1.02E+08 | sense | GGGACCA | 1320. | ACGAGGG | 1412. | TGG | 6 | 0.7003 |
| | | | | | | | | GCCAAGAT | | ACCAGCCA | | | | |
| | | | | | | | | CGAGG | | AGATCGA | | | | |
| | | | | | | | | | | GGTGGAC | | | | |
| | | | | | | | | | | C | | | | |
| PRDM1 | IL2RA | IL2RA high | 639 | NM_001198.3 | NC_000006.12 | 1.06E+08 | sense | AGGATGC | 1321. | ATGGAGG | 1413. | TGG | 2 | 0.7731 |
| | | | | | | | | GGATATG | | ATGCGGAT | | | | |
| | | | | | | | | ACTCTG | | ATGACTCT | | | | |
| | | | | | | | | | | GTGGACA | | | | |
| PRDM1 | IL2RA | IL2RA high | 639 | NM_001198.3 | NC_000006.12 | 1.06E+08 | antisense | GGACGCG | 1322. | CGTAGGA | 1414. | AGG | 5 | 0.6665 |
| | | | | | | | | TTCAAGTA | | CGCGTTCA | | | | |
| | | | | | | | | AGCGT | | AGTAAGC | | | | |
| | | | | | | | | | | GTAGGAG | | | | |
| | | | | | | | | | | T | | | | |
| PRDM1 | IL2RA | IL2RA high | 639 | NM_001198.3 | NC_000006.12 | 1.06E+08 | antisense | GGGGAGC | 1323. | AATGGGG | 1415. | GGG | 5 | 0.6871 |
| | | | | | | | | GAGTGAT | | GAGCGAG | | | | |
| | | | | | | | | GTACGT | | TGATGTAC | | | | |
| | | | | | | | | | | GTGGGTCT | | | | |
| PRDM1 | IL2RA | IL2RA high | 639 | NM_001198.3 | NC_000006.12 | 1.06E+08 | sense | TTTGGACA | 1324. | CTCTTTTG | 1416. | AGG | 4 | 0.6708 |
| | | | | | | | | GATCTATT | | GACAGATC | | | | |
| | | | | | | | | CCAG | | TATTCCAG | | | | |
| | | | | | | | | | | AGGGGA | | | | |
| MYC | IL2RA | IL2RA high | 4609 | NM_002467.4 | NC_000008.11 | 1.28E+08 | sense | AGAGTGC | 1325. | CCTCAGAG | 1417. | TGG | 2 | 0.6543 |
| | | | | | | | | ATCGACCC | | TGCATCGA | | | | |
| | | | | | | | | CTCGG | | CCCCTCGG | | | | |
| | | | | | | | | | | TGGTCT | | | | |
| MYC | IL2RA | IL2RA high | 4609 | NM_002467.4 | NC_000008.11 | 1.28E+08 | antisense | CTGCGGG | 1326. | TGCCCTGC | 1418. | AGG | 2 | 0.6832 |
| | | | | | | | | GAGGACT | | GGGGAGG | | | | |
| | | | | | | | | CCGTCG | | ACTCCGTC | | | | |
| | | | | | | | | | | GAGGAGA | | | | |
| MYC | IL2RA | IL2RA high | 4609 | NM_002467.4 | NC_000008.11 | 1.28E+08 | sense | CTTCGGG | 1327. | CTCCCTTC | 1419. | CGG | 2 | 0.6919 |
| | | | | | | | | GAGACAA | | GGGGAGA | | | | |
| | | | | | | | | CGACGG | | CAACGAC | | | | |
| | | | | | | | | | | GGCGGTG | | | | |
| | | | | | | | | | | G | | | | |
| MYC | IL2RA | IL2RA high | 4609 | NM_002467.4 | NC_000008.11 | 1.28E+08 | antisense | GCTGCACC | 1328. | TACGGCTG | 1420. | AGG | 2 | 0.6842 |
| | | | | | | | | GAGTCGTA | | CACCGAGT | | | | |
| | | | | | | | | GTCG | | CGTAGTCG | | | | |
| | | | | | | | | | | AGGTCA | | | | |
| SMARCB1 | IL2RA | IL2RA high | 6598 | NM_003073.3 | NC_000022.11 | 23791773 | antisense | GAGAACCT | 1329. | TACAGAG | 1421. | AGG | 2 | 0.731 |
| | | | | | | | | CGGAACAT | | AACCTCGG | | | | |
| | | | | | | | | ACGG | | AACATACG | | | | |
| | | | | | | | | | | GAGGTAG | | | | |
| SMARCB1 | IL2RA | IL2RA high | 6598 | NM_003073.3 | NC_000022.11 | 23816887 | sense | GCAGATC | 1330. | GACAGCA | 1422. | CGG | 6 | 0.6894 |
| | | | | | | | | GAGTCCTA | | GATCGAGT | | | | |
| | | | | | | | | CCCCA | | CCTACCCC | | | | |
| | | | | | | | | | | ACGGACA | | | | |
| SMARCB1 | IL2RA | IL2RA high | 6598 | NM_003073.3 | NC_000022.11 | 23801049 | antisense | TCTTCTTG | 1331. | GTTCTCTT | 1423. | CGG | 4 | 0.6806 |
| | | | | | | | | TCTCGGCC | | CTTGTCTC | | | | |
| | | | | | | | | CATG | | GGCCCATG | | | | |
| | | | | | | | | | | CGGTTC | | | | |
| SMARCB1 | IL2RA | IL2RA high | 6598 | NM_003073.3 | NC_000022.11 | 23803342 | sense | TGAGAAC | 1332. | TCCATGAG | 1424. | AGG | 5 | 0.6804 |
| | | | | | | | | GCATCTCA | | AACGCATC | | | | |
| | | | | | | | | GCCCG | | TCAGCCCG | | | | |
| | | | | | | | | | | AGGTGC | | | | |
| KLF13 | IL2RA | IL2RA high | 51621 | NM_015995.3 | NC_000015.10 | 31327702 | sense | CCGACCTC | 1333. | CGCGCCG | 1425. | AGG | 1 | 0.7221 |
| | | | | | | | | GAGTCCCC | | ACCTCGAG | | | | |
| | | | | | | | | GCAG | | TCCCCGCA | | | | |
| | | | | | | | | | | GAGGAAG | | | | |
| KLF13 | IL2RA | IL2RA high | 51621 | NM_015995.3 | NC_000015.10 | 31327415 | sense | CGTGGTG | 1334. | TCTTCGTG | 1426. | CGG | 1 | 0.6798 |
| | | | | | | | | GCGCGGA | | GTGGCGC | | | | |
| | | | | | | | | TCCTAG | | GGATCCTA | | | | |
| | | | | | | | | | | GCGGACC | | | | |
| KLF13 | IL2RA | IL2RA high | 51621 | NM_015995.3 | NC_000015.10 | 31327274 | sense | CGTGTCCA | 1335. | GCCTCGTG | 1427 | CGG | 1 | 0.7 |
| | | | | | | | | TGTCGAGC | | TCCATGTC | | | | |
| | | | | | | | | CGCG | | GAGCCGC | | | | |
| | | | | | | | | | | GCGGTCG | | | | |
| KLF13 | IL2RA | IL2RA high | 51621 | NM_015995.3 | NC_000015.10 | 31327767 | antisense | GAGTTCTC | 1336. | GTGTGAG | 1428. | AGG | 1 | 0.592 |
| | | | | | | | | AGGTGCG | | TTCTCAGG | | | | |
| | | | | | | | | CCTTG | | TGCGCCTT | | | | |
| | | | | | | | | | | GAGGTGC | | | | |
| IRF1 | IL2RA | IL2RA high | 3659 | NM_002198.2 | NC_000005.10 | 1.32E+08 | sense | GAACTCCC | 1337. | CCATGAAC | 1429. | AGG | 4 | 0.6297 |
| | | | | | | | | TGCCAGAT | | TCCCTGCC | | | | |
| | | | | | | | | ATCG | | AGATATCG | | | | |
| | | | | | | | | | | AGGAGG | | | | |
| IRF1 | IL2RA | IL2RA high | 3659 | NM_002198.2 | NC_000005.10 | 1.32E+08 | sense | TCTAGGCC | 1338. | GCCCTCTA | 1430. | GGG | 4 | 0.718 |
| | | | | | | | | GATACAAA | | GGCCGAT | | | | |
| | | | | | | | | GCAG | | ACAAAGC | | | | |
| | | | | | | | | | | AGGGGAA | | | | |
| | | | | | | | | | | A | | | | |
| IRF1 | IL2RA | IL2RA high | 3659 | NM_002198.2 | NC_000005.10 | 1.32E+08 | sense | TCTCCCTC | 1339. | GCTTTCTC | 1431. | GGG | 6 | 0.6137 |
| | | | | | | | | GACAGTCA | | CCTCGACA | | | | |
| | | | | | | | | TGTG | | GTCATGTG | | | | |
| | | | | | | | | | | GGGATT | | | | |
| IRF1 | IL2RA | IL2RA high | 3659 | NM_002198.2 | NC_000005.10 | 1.32E+08 | sense | TTAATTCC | 1340. | CAGATTAA | 1432. | GGG | 2 | 0.7113 |
| | | | | | | | | AACCAAAT | | TTCCAACC | | | | |
| | | | | | | | | CCCG | | AAATCCCG | | | | |
| | | | | | | | | | | GGGCTC | | | | |
| FOXO1 | IL2RA | IL2RA high | 2308 | NM_002015.3 | NC_000013.11 | 40665740 | antisense | ACAGGTTG | 1341. | TAGGACA | 1433. | CGG | 1 | 0.547 |
| | | | | | | | | CCCCACGC | | GGTTGCCC | | | | |
| | | | | | | | | GTTG | | CACGCGTT | | | | |
| | | | | | | | | | | GCGGCGG | | | | |
| FOXO1 | IL2RA | IL2RA high | 2308 | NM_002015.3 | NC_000013.11 | 40666107 | sense | GGAGTTTA | 1342. | GGCCGGA | 1434. | CGG | 1 | 0.629 |
| | | | | | | | | GCCAGTCC | | GTTTAGCC | | | | |
| | | | | | | | | AACT | | AGTCCAAC | | | | |
| | | | | | | | | | | TCGGCCA | | | | |
| FOXO1 | IL2RA | IL2RA high | 2308 | NM_002015.3 | NC_000013.11 | 40560279 | antisense | GGTGGCG | 1343. | GTTTGGTG | 1435. | CGG | 2 | 0.6741 |
| | | | | | | | | CAAACGA | | GCGCAAA | | | | |
| | | | | | | | | GTAGCA | | CGAGTAG | | | | |
| | | | | | | | | | | CACGGCGT | | | | |
| FOXO1 | IL2RA | IL2RA high | 2308 | NM_002015.3 | NC_000013.11 | 40560544 | antisense | TAGCATTT | 1344. | GTACTAGC | 1436. | GGG | 2 | 0.6665 |
| | | | | | | | | GAGCTAGT | | ATTTGAGC | | | | |
| | | | | | | | | TCGA | | TAGTTCGA | | | | |
| | | | | | | | | | | GGGCGA | | | | |
| IRF2 | IL2RA | IL2RA high | 3660 | NM_002199.3 | NC_000004.12 | 1.84E+08 | sense | ACCTGATC | 1345. | ATAAACCT | 1437. | AGG | 4 | 0.6049 |
| | | | | | | | | CCAAAACA | | GATCCCAA | | | | |
| | | | | | | | | TGGA | | AACATGG | | | | |
| | | | | | | | | | | AAGGCGA | | | | |
| IRF2 | IL2RA | IL2RA high | 3660 | NM_002199.3 | NC_000004.12 | 1.84E+08 | antisense | CAGCATTC | 1346. | GGGGCAG | 1438. | AGG | 4 | 0.6028 |
| | | | | | | | | GGTAGAC | | CATTCGGT | | | | |
| | | | | | | | | CCTGA | | AGACCCTG | | | | |
| | | | | | | | | | | AAGGCAT | | | | |
| IRF2 | IL2RA | IL2RA high | 3660 | NM_002199.3 | NC_000004.12 | 1.84E+08 | sense | GGATGCAT | 1347. | CCCTGGAT | 1439. | GGG | 3 | 0.6231 |
| | | | | | | | | GCGGCTA | | GCATGCG | | | | |
| | | | | | | | | GACAT | | GCTAGACA | | | | |
| | | | | | | | | | | TGGGTGG | | | | |
| IRF2 | IL2RA | IL2RA high | 3660 | NM_002199.3 | NC_000004.12 | 1.84E+08 | antisense | TACCTGCA | 1348. | CGCTTACC | 1440. | GGG | 7 | 0.7207 |
| | | | | | | | | TAGGAAG | | TGCATAGG | | | | |
| | | | | | | | | ACACG | | AAGACAC | | | | |
| | | | | | | | | | | GGGGGAG | | | | |
| KLF2 | IL2RA | IL2RA high | 10365 | NM_016270.2 | NC_000019.10 | 16325729 | antisense | AAACCAG | 1349. | GCCGAAA | 1441. | CGG | 2 | 0.5997 |
| | | | | | | | | GGCCACC | | CCAGGGC | | | | |
| | | | | | | | | GAAAGG | | CACCGAAA | | | | |
| | | | | | | | | | | GGCGGCG | | | | |
| | | | | | | | | | | G | | | | |
| KLF2 | IL2RA | IL2RA high | 10365 | NM_016270.2 | NC_000019.10 | 16325576 | antisense | CCCTCGCG | 1350. | GGCGCCCT | 1442. | CGG | 2 | 0.5868 |
| | | | | | | | | CTTGAGGC | | CGCGCTTG | | | | |
| | | | | | | | | CGCG | | AGGCCGC | | | | |
| | | | | | | | | | | GCGGTCC | | | | |
| KLF2 | IL2RA | IL2RA high | 10365 | NM_016270.2 | NC_000019.10 | 16325811 | sense | CTTCGGTC | 1351. | CAGCCTTC | 1443. | CGG | 2 | 0.7252 |
| | | | | | | | | TCTTCGAC | | GGTCTCTT | | | | |
| | | | | | | | | GACG | | CGACGAC | | | | |
| | | | | | | | | | | GCGGCCG | | | | |
| KLF2 | IL2RA | IL2RA high | 10365 | NM_016270.2 | NC_000019.10 | 16325354 | antisense | TCGGGGT | 1352. | GGGTTCG | 1444. | CGG | 2 | 0.6967 |
| | | | | | | | | AATAGAAC | | GGGTAAT | | | | |
| | | | | | | | | GCAGG | | AGAACGC | | | | |
| | | | | | | | | | | AGGCGGC | | | | |
| | | | | | | | | | | GG | | | | |
| ZNF217 | IL2RA | IL2RA high | 7764 | NM_006526.2 | NC_000020.11 | 53581993 | sense | CAAAATCT | 1353. | AGACCAA | 1445. | GGG | 1 | 0.6608 |
| | | | | | | | | CACCCTGA | | AATCTCAC | | | | |
| | | | | | | | | AACG | | CCTGAAAC | | | | |
| | | | | | | | | | | GGGGAAG | | | | |
| ZNF217 | IL2RA | IL2RA high | 7764 | NM_006526.2 | NC_000020.11 | 53581749 | sense | CCACGGC | 1354. | ACTCCCAC | 1446. | TGG | 1 | 0.6177 |
| | | | | | | | | GAAGCGC | | GGCGAAG | | | | |
| | | | | | | | | CCTCCG | | CGCCCTCC | | | | |
| | | | | | | | | | | GTGGACG | | | | |
| ZNF217 | IL2RA | IL2RA high | 7764 | NM_006526.2 | NC_000020.11 | 53582284 | sense | GGACACAT | 1355. | ATGCGGA | 1447. | GGG | 1 | 0.7154 |
| | | | | | | | | AATGGCA | | CACATAAT | | | | |
| | | | | | | | | AATCG | | GGCAAATC | | | | |
| | | | | | | | | | | GGGGGCC | | | | |
| ZNF217 | IL2RA | IL2RA high | 7764 | NM_006526.2 | NC_000020.11 | 53576811 | antisense | TGGGTGG | 1356. | GTTATGG | 1448. | AGG | 3 | 0.6707 |
| | | | | | | | | TACTGCCA | | GTGGTACT | | | | |
| | | | | | | | | TCCGG | | GCCATCCG | | | | |
| | | | | | | | | | | GAGGAGG | | | | |
| TNFAIP3 | IL2RA | IL2RA high | 7128 | NM_001270507.1 | NC_000006.12 | 1.38E+08 | sense | CCACTTGT | 1357. | TGTTCCAC | 1449. | GGG | 6 | 0.6901 |
| | | | | | | | | TAACAGA | | TTGTTAAC | | | | |
| | | | | | | | | GACCG | | AGAGACC | | | | |
| | | | | | | | | | | GGGGAAG | | | | |
| TNFAIP3 | IL2RA | IL2RA high | 7128 | NM_001270507.1 | NC_000006.12 | 1.38E+08 | sense | CTTGTGGC | 1358. | GAAGCTTG | 1450. | CGG | 2 | 0.6709 |
| | | | | | | | | GCTGAAA | | TGGCGCT | | | | |
| | | | | | | | | ACGAA | | GAAAACG | | | | |
| | | | | | | | | | | AACGGTA | | | | |
| | | | | | | | | | | A | | | | |
| TNFAIP3 | IL2RA | IL2RA high | 7128 | NM_001270507.1 | NC_000006.12 | 1.38E+08 | sense | TATGCCAT | 1359. | CCTTTATG | 1451. | AGG | 7 | 0.7533 |
| | | | | | | | | GAGTGCTC | | CCATGAGT | | | | |
| | | | | | | | | AGAG | | GCTCAGA | | | | |
| | | | | | | | | | | GAGGCGG | | | | |
| TNFAIP3 | IL2RA | IL2RA high | 7128 | NM_001270507.1 | NC_000006.12 | 1.38E+08 | antisense | TGAGAGA | 1360. | GATTTGAG | 1452. | CGG | 3 | 0.6393 |
| | | | | | | | | CTCCAGTT | | AGACTCCA | | | | |
| | | | | | | | | GCCAG | | GTTGCCAG | | | | |
| | | | | | | | | | | CGGAAT | | | | |
| FOXK1 | IL2RA | IL2RA high | 221937 | NM_001037165.1 | NC_000007.14 | 4757132 | sense | AACAGGC | 1361. | GTGGAAC | 1453. | AGG | 5 | 0.6681 |
| | | | | | | | | ATTCCGGA | | AGGCATTC | | | | |
| | | | | | | | | AACGG | | CGGAAAC | | | | |
| | | | | | | | | | | GGAGGCA | | | | |
| | | | | | | | | | | G | | | | |
| FOXK1 | IL2RA | IL2RA high | 221937 | NM_001037165.1 | NC_000007.14 | 4754516 | antisense | AGGTCAC | 1362. | TCCGAGGT | 1454. | CGG | 3 | 0.734 |
| | | | | | | | | GTTCTGCA | | CACGTTCT | | | | |
| | | | | | | | | CAAAG | | GCACAAA | | | | |
| | | | | | | | | | | GCGGTAA | | | | |
| FOXK1 | IL2RA | IL2RA high | 221937 | NM_001037165.1 | NC_000007.14 | 4759162 | antisense | CTAACTTG | 1363. | GAAGCTA | 1455. | GGG | 6 | 0.6672 |
| | | | | | | | | GACCCAAA | | ACTTGGAC | | | | |
| | | | | | | | | CTCA | | CCAAACTC | | | | |
| | | | | | | | | | | AGGGTCG | | | | |
| FOXK1 | IL2RA | IL2RA high | 221937 | NM_001037165.1 | NC_000007.14 | 4755361 | sense | GCATTACC | 1364. | CCAAGCAT | 1456. | CGG | 4 | 0.7131 |
| | | | | | | | | CCTACTAC | | TACCCCTA | | | | |
| | | | | | | | | CGGA | | CTACCGGA | | | | |
| | | | | | | | | | | CGGCCG | | | | |
| MYB | IL2RA | IL2RA high | 4602 | NM_005375.2 | NC_000006.12 | 1.35E+08 | sense | ACCAGGC | 1365. | ATTTACCA | 1457. | GGG | 5 | 0.6859 |
| | | | | | | | | ACACAAG | | GGCACAC | | | | |
| | | | | | | | | AGACTG | | AAGAGAC | | | | |
| | | | | | | | | | | TGGGGAA | | | | |
| | | | | | | | | | | C | | | | |
| MYB | IL2RA | IL2RA high | 4602 | NM_005375.2 | NC_000006.12 | 1.35E+08 | sense | AGAAATAC | 1366. | GTACAGA | 1458. | TGG | 5 | 0.6009 |
| | | | | | | | | GGTCCGA | | AATACGGT | | | | |
| | | | | | | | | AACGT | | CCGAAAC | | | | |
| | | | | | | | | | | GTTGGTCT | | | | |
| MYB | IL2RA | IL2RA high | 4602 | NM_005375.2 | NC_000006.12 | 1.35E+08 | sense | AGTCTGGA | 1367. | CCCAAGTC | 1459. | GGG | 2 | 0.7063 |
| | | | | | | | | AAGCGTCA | | TGGAAAG | | | | |
| | | | | | | | | CTTG | | CGTCACTT | | | | |
| | | | | | | | | | | GGGGAAA | | | | |
| MYB | IL2RA | IL2RA high | 4602 | NM_005375.2 | NC_000006.12 | 1.35E+08 | antisense | TATTTACA | 1368. | ACTATATT | 1460 | GGG | 7 | 0.6157 |
| | | | | | | | | TGTAACGC | | TACATGTA | | | | |
| | | | | | | | | TACA | | ACGCTACA | | | | |
| | | | | | | | | | | GGGTAT | | | | |
| CBFB | IL2RA | IL2RA high | 865 | NM_001755.2 | NC_000016.10 | 67036720 | antisense | AAGTCGAC | 1369. | TTCTAAGT | 1461. | AGG | 3 | 0.5993 |
| | | | | | | | | ATACTCTC | | CGACATAC | | | | |
| | | | | | | | | GGCT | | TCTCGGCT | | | | |
| | | | | | | | | | | AGGTGT | | | | |
| CBFB | IL2RA | IL2RA high | 865 | NM_001755.2 | NC_000016.10 | 67029479 | antisense | CCTGCCTC | 1370. | CCCGCCTG | 1462. | CGG | 1 | 0.6743 |
| | | | | | | | | ACCTCACA | | CCTCACCT | | | | |
| | | | | | | | | CTCG | | CACACTCG | | | | |
| | | | | | | | | | | CGGCTC | | | | |
| CBFB | IL2RA | IL2RA high | 865 | NM_001755.2 | NC_000016.10 | 67029807 | antisense | GCCGACTT | 1371. | GCCAGCC | 1463. | CGG | 2 | 0.7383 |
| | | | | | | | | ACGATTTC | | GACTTACG | | | | |
| | | | | | | | | CGAG | | ATTTCCGA | | | | |
| | | | | | | | | | | GCGGCCG | | | | |
| CBFB | IL2RA | IL2RA high | 865 | NM_001755.2 | NC_000016.10 | 67066729 | sense | GGAGTCT | 1372. | GAATGGA | 1464. | AGG | 4 | 0.5938 |
| | | | | | | | | GTGTTATC | | GTCTGTGT | | | | |
| | | | | | | | | TGGAA | | TATCTGGA | | | | |
| | | | | | | | | | | AAGGCTG | | | | |
| HIVEP2 | IL2RA | IL2RA high | 3097 | NM_006734.3 | NC_000006.12 | 1.43E+08 | antisense | CCCTGGAT | 1373. | CGGTCCCT | 1465. | CGG | 5 | 0.6747 |
| | | | | | | | | AGAATACA | | GGATAGA | | | | |
| | | | | | | | | TCGT | | ATACATCG | | | | |
| | | | | | | | | | | TCGGAAC | | | | |
| HIVEP2 | IL2RA | IL2RA high | 3097 | NM_006734.3 | NC_000006.12 | 1.43E+08 | sense | GACAAGA | 1374. | TTCAGACA | 1466. | GGG | 5 | 0.7382 |
| | | | | | | | | TGTCAGAC | | AGATGTCA | | | | |
| | | | | | | | | CTAGG | | GACCTAG | | | | |
| | | | | | | | | | | GGGGCAG | | | | |
| HIVEP2 | IL2RA | IL2RA high | 3097 | NM_006734.3 | NC_000006.12 | 1.43E+08 | antisense | GAGGTGG | 1375. | GTCAGAG | 1467. | GGG | 5 | 0.6922 |
| | | | | | | | | AAGGTAA | | GTGGAAG | | | | |
| | | | | | | | | ACACAA | | GTAAACAC | | | | |
| | | | | | | | | | | AAGGGGA | | | | |
| | | | | | | | | | | T | | | | |
| HIVEP2 | IL2RA | IL2RA high | 3097 | NM_006734.3 | NC_000006.12 | 1.43E+08 | antisense | TTCTAGGA | 1376. | TTTTTTCTA | 1468. | TGG | 5 | 0.71 |
| | | | | | | | | TAACCACC | | GGATAACC | | | | |
| | | | | | | | | ACTG | | ACCACTGT | | | | |
| | | | | | | | | | | GGCCA | | | | |
| MED12 | IL2RA | IL2RA high | 9968 | NM_005120.2 | NC_000023.11 | 71130165 | sense | ACATCGAC | 1377. | ATCCACAT | 1469. | AGG | 28 | 0.6457 |
| | | | | | | | | TGCTGGAC | | CGACTGCT | | | | |
| | | | | | | | | AATG | | GGACAAT | | | | |
| | | | | | | | | | | GAGGATG | | | | |
| MED12 | IL2RA | IL2RA high | 9968 | NM_005120.2 | NC_000023.11 | 71122231 | antisense | CAGTGAGT | 1378. | CAGTCAGT | 1470. | AGG | 8 | 0.688 |
| | | | | | | | | AGTGCCAA | | GAGTAGT | | | | |
| | | | | | | | | ACCA | | GCCAAACC | | | | |
| | | | | | | | | | | AAGGCAC | | | | |
| MED12 | IL2RA | IL2RA high | 9968 | NM_005120.2 | NC_000023.11 | 71125111 | antisense | GTGGCGT | 1379. | ATGGGTG | 1471. | TGG | 15 | 0.6661 |
| | | | | | | | | ACTGCACG | | GCGTACTG | | | | |
| | | | | | | | | TGTCG | | CACGTGTC | | | | |
| | | | | | | | | | | GTGGCTG | | | | |
| MED12 | IL2RA | IL2RA high | 9968 | NM_005120.2 | NC_000023.11 | 71126138 | sense | TTCACATT | 1380. | ACCTTTCA | 1472. | AGG | 18 | 0.6594 |
| | | | | | | | | ATGACCAA | | CATTATGA | | | | |
| | | | | | | | | CACC | | CCAACACC | | | | |
| | | | | | | | | | | AGGTCA | | | | |

TABLE 8
Nuclear factors that can be inhibited to decrease IL2RA expression or overexpressed to increase IL2RA expression

| | | | | | | Position of | | | | | | | |
|---|---|---|---|---|---|---|---|---|---|---|---|---|---|
| | | | Target | | | Base After | | sgRNA | SEQ | Target | SEQ | | |
| gene_ | screen_ | screen_ | Gene | Target | Genomic | Cut (1- | | Target | ID | Context | ID | PAM | Exon |
| id | target | direction | ID | Transcript | Sequence | based) | Strand | Sequence | NO: | Sequence | NO: | Sequence | Number |
| IL2RA | IL2RA | IL2RA low | 3559 | NM_000417.2 | NC_000010.11 | 6021582 | sense | GGATACAGG | 1473. | CCAGGGATACA | 1584 | AGG | 4 |
| | | | | | | | | GCTCTACAC | | GGGCTCTACAC | | | |
| | | | | | | | | AG | | AGAGGTCC | | | |
| IL2RA | IL2RA | IL2RA low | 3559 | NM_000417.2 | NC_000010.11 | 6025992 | antisense | TGGCTTTGA | 1474. | GCCATGGCTTT | 1585 | GGG | 2 |
| | | | | | | | | ATGTGGCGT | | GAATGTGGCGT | | | |
| | | | | | | | | GT | | GTGGGATC | | | |
| IL2RA | IL2RA | IL2RA low | 3559 | NM_000417.2 | NC_000010.11 | 6024349 | antisense | TTGTTTCGTT | 1475. | TCACTTGTTTCG | 1586 | TGG | 3 |
| | | | | | | | | GTGTTCCGA | | TTGTGTTCCGAG | | | |
| | | | | | | | | G | | TGGCTA | | | |
| STAT5B | IL2RA | IL2RA low | 6777 | NM_012448.3 | NC_000017.11 | 42216055 | sense | CAGCCAGGA | 1476. | ATGGCAGCCAG | 1587 | CGG | 12 |
| | | | | | | | | CAACAATGC | | GACAACAATGC | | | |
| | | | | | | | | GA | | GACGGCCA | | | |
| STAT5B | IL2RA | IL2RA low | 6777 | NM_012448.3 | NC_000017.11 | 42227658 | antisense | GTGGCCTTA | 1477. | CTGGGTGGCCT | 1588 | TGG | 3 |
| | | | | | | | | ATGTTCTCCT | | TAATGTTCTCCT | | | |
| | | | | | | | | G | | GTGGATT | | | |
| STAT5B | IL2RA | IL2RA low | 6777 | NM_012448.3 | NC_000017.11 | 42224822 | antisense | GTTCATTGT | 1478. | CTCTGTTCATTG | 1589 | CGG | 4 |
| | | | | | | | | ACAATATAT | | TACAATATATG | | | |
| | | | | | | | | GG | | GCGGATG | | | |
| STAT5B | IL2RA | IL2RA low | 6777 | NM_012448.3 | NC_000017.11 | 42217252 | sense | TAAGAGGTC | 1479. | GAATTAAGAGG | 1590 | GGG | 11 |
| | | | | | | | | AGACCGTCG | | TCAGACCGTCG | | | |
| | | | | | | | | TG | | TGGGGCAG | | | |
| FOXP1 | IL2RA | IL2RA low | 27086 | NM_032682.5 | NC_000003.12 | 71041428 | antisense | AGAGGAGG | 1480. | GTGCAGAGGAG | 1591 | TGG | 11 |
| | | | | | | | | AGACACATG | | GAGACACATGT | | | |
| | | | | | | | | TCG | | CGTGGTCA | | | |
| FOXP1 | IL2RA | IL2RA low | 27086 | NM_032682.5 | NC_000003.12 | 71015617 | antisense | CATACACCA | 1481. | CTTGCATACACC | 1592 | AGG | 12 |
| | | | | | | | | TGTCCATAG | | ATGTCCATAGA | | | |
| | | | | | | | | AG | | GAGGATG | | | |
| FOXP1 | IL2RA | IL2RA low | 27086 | NM_032682.5 | NC_000003.12 | 71046982 | sense | GCCTTCTGA | 1482. | CAAGGCCTTCT | 1593 | GGG | 10 |
| | | | | | | | | CAATTCAGC | | GACAATTCAGC | | | |
| | | | | | | | | CC | | CCGGGCAG | | | |
| FOXP1 | IL2RA | IL2RA low | 27086 | NM_032682.5 | NC_000003.12 | 70988031 | antisense | GTTCTGTAG | 1483. | TTGGGTTCTGTA | 1594 | AGG | 14 |
| | | | | | | | | ACTTCACAT | | GACTTCACATGC | | | |
| | | | | | | | | GC | | AGGTGG | | | |
| STAT5A | IL2RA | IL2RA low | 6776 | NM_003152.3 | NC_000017.11 | 42292035 | sense | ACATTCTGT | 1484. | CGGCACATTCT | 1595 | AGG | 5 |
| | | | | | | | | ACAATGAAC | | GTACAATGAAC | | | |
| | | | | | | | | AG | | AGAGGCTG | | | |
| STAT5A | IL2RA | IL2RA low | 6776 | NM_003152.3 | NC_000017.11 | 42304559 | sense | ATCAAGCGT | 1485. | GAGGATCAAGC | 1596 | GGG | 12 |
| | | | | | | | | GCTGACCGG | | GTGCTGACCGG | | | |
| | | | | | | | | CG | | CGGGGTGC | | | |
| STAT5A | IL2RA | IL2RA low | 6776 | NM_003152.3 | NC_000017.11 | 42305662 | sense | CAGCCAGGA | 1486. | ACGGCAGCCAG | 1597 | CGG | 13 |
| | | | | | | | | CCACAATGC | | GACCACAATGC | | | |
| | | | | | | | | CA | | CACGGCTA | | | |
| STAT5A | IL2RA | IL2RA low | 6776 | NM_003152.3 | NC_000017.11 | 42301385 | sense | CGTGCACAT | 1487. | TGAACGTGCAC | 1598 | AGG | 10 |
| | | | | | | | | GAATCCCCC | | ATGAATCCCCCC | | | |
| | | | | | | | | CC | | CAGGTGA | | | |
| GATA3 | IL2RA | IL2RA low | 2625 | NM_002051.2 | NC_000010.11 | 8055892 | sense | AGGTACCCT | 1488. | GCAGAGGTACC | 1599 | CGG | 2 |
| | | | | | | | | CCGACCCAC | | CTCCGACCCACC | | | |
| | | | | | | | | CA | | ACGGTGA | | | |
| GATA3 | IL2RA | IL2RA low | 2625 | NM_002051.2 | NC_000010.11 | 8064014 | sense | CAGGGAGT | 1489. | AAGGCAGGGA | 1600 | GGG | 4 |
| | | | | | | | | GTGTGAACT | | GTGTGTGAACT | | | |
| | | | | | | | | GTG | | GTGGGGCAA | | | |
| GATA3 | IL2RA | IL2RA low | 2625 | NM_002051.2 | NC_000010.11 | 8058740 | antisense | GGAGCTGTA | 1490. | GTCCGGAGCTG | 1601 | AGG | 3 |
| | | | | | | | | CTCGGGCAC | | TACTCGGGCAC | | | |
| | | | | | | | | GT | | GTAGGGCG | | | |
| GATA3 | IL2RA | IL2RA low | 2625 | NM_002051.2 | NC_000010.11 | 8058432 | sense | TCCAAGACG | 1491. | CTTCTCCAAGAC | 1602 | CGG | 3 |
| | | | | | | | | TCCATCCAC | | GTCCATCCACCA | | | |
| | | | | | | | | CA | | CGGCTC | | | |
| KMT2A | IL2RA | IL2RA low | 4297 | NM_005933.3 | NC_000011.10 | 1.19E+08 | antisense | AAGATCAGT | 1492. | ATTCAAGATCA | 1603 | TGG | 27 |
| | | | | | | | | AGCGGTCCC | | GTAGCGGTCCC | | | |
| | | | | | | | | GG | | GGTGGTGG | | | |
| KMT2A | IL2RA | IL2RA low | 4297 | NM_005933.3 | NC_000011.10 | 1.18E+08 | sense | AGAAAGGA | 1493. | GTAAAGAAAGG | 1604 | CGG | 5 |
| | | | | | | | | CGTCGATCG | | ACGTCGATCGA | | | |
| | | | | | | | | AGG | | GGCGGTGT | | | |
| KMT2A | IL2RA | IL2RA low | 4297 | NM_005933.3 | NC_000011.10 | 1.18E+08 | antisense | AGGGGTCTT | 1494. | GCCGAGGGGTC | 1605 | AGG | 3 |
| | | | | | | | | AATGATCCG | | TTAATGATCCGC | | | |
| | | | | | | | | CG | | GAGGAGA | | | |
| KMT2A | IL2RA | IL2RA low | 4297 | NM_005933.3 | NC_000011.10 | 1.18E+08 | sense | TTGACCATA | 1495. | TCACTTGACCAT | 1606 | TGG | 19 |
| | | | | | | | | ATTATGCTC | | AATTATGCTCAG | | | |
| | | | | | | | | AG | | TGGCAG | | | |
| PTEN | IL2RA | IL2RA low | 5728 | NM_001304718.1 | NC_000010.11 | 87961027 | sense | AGAGCGTGC | 1496. | GTATAGAGCGT | 1607 | AGG | 8 |
| | | | | | | | | AGATAATGA | | GCAGATAATGA | | | |
| | | | | | | | | CA | | CAAGGAAT | | | |
| PTEN | IL2RA | IL2RA low | 5728 | NM_001304718.1 | NC_000010.11 | 87957861 | antisense | AGCTGGCAG | 1497. | CTTTAGCTGGCA | 1608 | AGG | 7 |
| | | | | | | | | ACCACAAAC | | GACCACAAACT | | | |
| | | | | | | | | TG | | GAGGATC | | | |
| PTEN | IL2RA | IL2RA low | 5728 | NM_001304718.1 | NC_000010.11 | 87960940 | sense | ATTCTTCATA | 1498. | ATACATTCTTCA | 1609 | AGG | 8 |
| | | | | | | | | CCAGGACCA | | TACCAGGACCA | | | |
| | | | | | | | | G | | GAGGAAA | | | |
| PTEN | IL2RA | IL2RA low | 5728 | NM_001304718.1 | NC_000010.11 | 87957915 | sense | CCAATTCAG | 1499. | TCCTCCAATTCA | 1610 | CGG | 7 |
| | | | | | | | | GACCCACAC | | GGACCCACACG | | | |
| | | | | | | | | GA | | ACGGGAA | | | |
| RELA | IL2RA | IL2RA low | 5970 | NM_001243984.1 | NC_000011.10 | 65659757 | sense | ACTACGACC | 1500. | GGGGACTACGA | 1611 | CGG | 6 |
| | | | | | | | | TGAATGCTG | | CCTGAATGCTGT | | | |
| | | | | | | | | TG | | GCGGCTC | | | |
| RELA | IL2RA | IL2RA low | 5970 | NM_001243984.1 | NC_000011.10 | 65662009 | sense | GCTTCCGCT | 1501. | ATGCGCTTCCGC | 1612 | GGG | 3 |
| | | | | | | | | ACAAGTGCG | | TACAAGTGCGA | | | |
| | | | | | | | | AG | | GGGGCGC | | | |
| RELA | IL2RA | IL2RA low | 5970 | NM_001243984.1 | NC_000011.10 | 65658759 | antisense | GGAAGATCT | 1502. | AGTAGGAAGAT | 1613 | AGG | 7 |
| | | | | | | | | CATCCCCAC | | CTCATCCCCACC | | | |
| | | | | | | | | CG | | GAGGCAG | | | |
| RELA | IL2RA | IL2RA low | 5970 | NM_001243984.1 | NC_000011.10 | 65661818 | sense | TCAATGGCT | 1503. | CAGATCAATGG | 1614 | GGG | 4 |
| | | | | | | | | ACACAGGAC | | CTACACAGGAC | | | |
| | | | | | | | | CA | | CAGGGACA | | | |
| ETS1 | IL2RA | IL2RA low | 2113 | NM_005238.3 | NC_000011.10 | 1.28E+08 | antisense | CTTACTAAT | 1504. | TGAACTTACTAA | 1615 | AGG | 4 |
| | | | | | | | | GAAGTAATC | | TGAAGTAATCC | | | |
| | | | | | | | | CG | | GAGGTAT | | | |
| ETS1 | IL2RA | IL2RA low | 2113 | NM_005238.3 | NC_000011.10 | 1.28E+08 | antisense | GAGAAAGC | 1505. | GCTCGAGAAAG | 1616 | GGG | 3 |
| | | | | | | | | AGTCTTTAC | | CAGTCTTTACCC | | | |
| | | | | | | | | CCA | | AGGGCGC | | | |
| ETS1 | IL2RA | IL2RA low | 2113 | NM_005238.3 | NC_000011.10 | 1.28E+08 | antisense | GGTCTCGGA | 1506. | AGAGGGTCTCG | 1617 | GGG | 5 |
| | | | | | | | | GAATGACCG | | GAGAATGACCG | | | |
| | | | | | | | | AG | | AGGGGTAG | | | |
| ETS1 | IL2RA | IL2RA low | 2113 | NM_005238.3 | NC_000011.10 | 1.28E+08 | sense | TGCATGGGG | 1507. | CATGTGCATGG | 1618 | TGG | 5 |
| | | | | | | | | AGGACCAGT | | GGAGGACCAGT | | | |
| | | | | | | | | CG | | CGTGGTAG | | | |
| RBPJ | IL2RA | IL2RA low | 3516 | NM_005349.3 | NC_000004.12 | 26415547 | sense | AAAGAACAA | 1508. | AAAAAAAGAAC | 1619 | TGG | 5 |
| | | | | | | | | ATGGAACGC | | AAATGGAACGC | | | |
| | | | | | | | | GA | | GATGGTTG | | | |
| RBPJ | IL2RA | IL2RA low | 3516 | NM_005349.3 | NC_000004.12 | 26386378 | antisense | CACCTAGTA | 1509. | TACTCACCTAGT | 1620 | TGG | 3 |
| | | | | | | | | AGTCGTTTA | | AAGTCGTTTAG | | | |
| | | | | | | | | GG | | GTGGAGG | | | |
| RBPJ | IL2RA | IL2RA low | 3516 | NM_005349.3 | NC_000004.12 | 26424454 | sense | CATGCCAGT | 1510. | TTTTCATGCCAG | 1621 | GGG | 7 |
| | | | | | | | | TCACAGCAG | | TTCACAGCAGT | | | |
| | | | | | | | | TG | | GGGGAGC | | | |
| RBPJ | IL2RA | IL2RA low | 3516 | NM_005349.3 | NC_000004.12 | 26424363 | sense | CATTGCCTC | 1511. | TATGCATTGCCT | 1622 | TGG | 7 |
| | | | | | | | | AGGAACAAA | | CAGGAACAAAG | | | |
| | | | | | | | | GG | | GTGGCTC | | | |
| RXRB | IL2RA | IL2RA low | 6257 | NM_021976.4 | NC_000006.12 | 33198326 | sense | ACGGCTATG | 1512. | GCAAACGGCTA | 1623 | GGG | 3 |
| | | | | | | | | TGCAATCTG | | TGTGCAATCTGC | | | |
| | | | | | | | | CG | | GGGGACA | | | |
| RXRB | IL2RA | IL2RA low | 6257 | NM_021976.4 | NC_000006.12 | 33200341 | sense | GCCCTGGCT | 1513. | GACGGCCCTGG | 1624 | CGG | 1 |
| | | | | | | | | GGATCCCGC | | CTGGATCCCGC | | | |
| | | | | | | | | AG | | AGCGGCGG | | | |
| RXRB | IL2RA | IL2RA low | 6257 | NM_021976.4 | NC_000006.12 | 33197840 | sense | GGACAACAA | 1514. | GCCGGGACAAC | 1625 | TGG | 4 |
| | | | | | | | | AGACTGCAC | | AAAGACTGCAC | | | |
| | | | | | | | | AG | | AGTGGACA | | | |
| RXRB | IL2RA | IL2RA low | 6257 | NM_021976.4 | NC_000006.12 | 33198421 | antisense | GTGGCTTCA | 1515. | ACTGGTGGCTT | 1626 | GGG | 3 |
| | | | | | | | | CATCTTCAG | | CACATCTTCAGG | | | |
| | | | | | | | | GG | | GGGGCCA | | | |
| ZNF148 | IL2RA | IL2RA low | 7707 | NM_021964.2 | NC_000003.12 | 1.25E+08 | sense | AGATCGAAG | 1516. | TTCAAGATCGA | 1627 | AGG | 4 |
| | | | | | | | | TATGCCTCA | | AGTATGCCTCAC | | | |
| | | | | | | | | CC | | CAGGAGA | | | |
| ZNF148 | IL2RA | IL2RA low | 7707 | NM_021964.2 | NC_000003.12 | 1.25E+08 | antisense | AGTGCATAC | 1517. | ATTAAGTGCAT | 1628 | AGG | 4 |
| | | | | | | | | TGTAGTCCT | | ACTGTAGTCCTT | | | |
| | | | | | | | | TG | | GAGGAAG | | | |
| ZNF148 | IL2RA | IL2RA low | 7707 | NM_021964.2 | NC_000003.12 | 1.25E+08 | antisense | GAGCCCCCA | 1518. | ATGCGAGCCCC | 1629 | TGG | 9 |
| | | | | | | | | ACTGACGAA | | CAACTGACGAA | | | |
| | | | | | | | | TG | | TGTGGCAT | | | |
| ZNF148 | IL2RA | IL2RA low | 7707 | NM_021964.2 | NC_000003.12 | 1.25E+08 | antisense | TAATTAGTA | 1519. | ATCATAATTAGT | 1630 | AGG | 9 |
| | | | | | | | | CTACTATGC | | ACTACTATGCAC | | | |
| | | | | | | | | AC | | AGGTTT | | | |
| VPS52 | IL2RA | IL2RA low | 6293 | NM_001289174.1 | NC_000006.12 | 33267957 | sense | CAATGAACG | 1520. | TGGGCAATGAA | 1631 | AGG | 8 |
| | | | | | | | | AGCAACAGC | | CGAGCAACAGC | | | |
| | | | | | | | | AA | | AAAGGAGA | | | |
| VPS52 | IL2RA | IL2RA low | 6293 | NM_001289174.1 | NC_000006.12 | 33266562 | sense | CCGTACACT | 1521. | TGGGCCGTACA | 1632 | TGG | 11 |
| | | | | | | | | CAGCATGAC | | CTCAGCATGAC | | | |
| | | | | | | | | CC | | CCTGGTAA | | | |
| VPS52 | IL2RA | IL2RA low | 6293 | NM_001289174.1 | NC_000006.12 | 33269070 | sense | GAAATCGCC | 1522. | CTTCGAAATOGC | 1633 | GGG | 5 |
| | | | | | | | | AGGCAGTTC | | CAGGCAGTTCG | | | |
| | | | | | | | | GG | | GGGGAAA | | | |
| VPS52 | IL2RA | IL2RA low | 6293 | NM_001289174.1 | NC_000006.12 | 33264461 | antisense | TCCAGGATC | 1523. | CATCTCCAGGAT | 1634 | TGG | 13 |
| | | | | | | | | AGTTCAAAC | | CAGTTCAAACC | | | |
| | | | | | | | | CG | | GTGGCCA | | | |
| TFAP4 | IL2RA | IL2RA low | 7023 | NM_003223.2 | NC_000016.10 | 4262329 | sense | ACAGCTCAA | 1524. | ACACACAGCTC | 1635 | AGG | 3 |
| | | | | | | | | GCGCTTCAT | | AAGCGCTTCATC | | | |
| | | | | | | | | CC | | CAGGTGC | | | |
| TFAP4 | IL2RA | IL2RA low | 7023 | NM_003223.2 | NC_000016.10 | 4261877 | sense | AGGCTCCCC | 1525. | GCATAGGCTCC | 1636 | AGG | 4 |
| | | | | | | | | GGACATCTG | | CCGGACATCTG | | | |
| | | | | | | | | GG | | GGAGGACG | | | |
| TFAP4 | IL2RA | IL2RA low | 7023 | NM_003223.2 | NC_000016.10 | 4262671 | sense | CACTAACCC | 1526. | ATTCCACTAACC | 1637 | CGG | 2 |
| | | | | | | | | CCGAGACTC | | CCCGAGACTCA | | | |
| | | | | | | | | AG | | GCGGGAC | | | |
| TFAP4 | IL2RA | IL2RA low | 7023 | NM_003223.2 | NC_000016.10 | 4262597 | sense | CGCATGCAG | 1527. | GAGACGCATGC | 1638 | GGG | 2 |
| | | | | | | | | AGCATCAAC | | AGAGCATCAAC | | | |
| | | | | | | | | GC | | GCGGGATT | | | |
| IKZF3 | IL2RA | IL2RA low | 22806 | NM_012481.4 | NC_000017.11 | 39792732 | sense | AAGATGAAC | 1528. | TGGAAAGATGA | 1639 | TGG | 4 |
| | | | | | | | | TGCGATGTG | | ACTGCGATGTG | | | |
| | | | | | | | | TG | | TGTGGATT | | | |
| IKZF3 | IL2RA | IL2RA low | 22806 | NM_012481.4 | NC_000017.11 | 39788318 | sense | CAAGCAGAG | 1529. | GTTACAAGCAG | 1640 | AGG | 6 |
| | | | | | | | | AAGTTCCCT | | AGAAGTTCCCTT | | | |
| | | | | | | | | TG | | GAGGAGC | | | |
| IKZF3 | IL2RA | IL2RA low | 22806 | NM_012481.4 | NC_000017.11 | 39766413 | sense | GCTCATACA | 1530. | GTGAGCTCATA | 1641 | TGG | 8 |
| | | | | | | | | GACCCGCAT | | CAGACCCGCAT | | | |
| | | | | | | | | GA | | GATGGACC | | | |
| IKZF3 | IL2RA | IL2RA low | 22806 | NM_012481.4 | NC_000017.11 | 39777693 | sense | GGACAGATT | 1531 | TACTGGACAGA | 1642 | TGG | 7 |
| | | | | | | | | AGCAAGCAA | | TTAGCAAGCAA | | | |
| | | | | | | | | TG | | TGTGGCAA | | | |
| SRF | IL2RA | IL2RA low | 6722 | NM_003131.3 | NC_000006.12 | 43175724 | antisense | AGGTTGGTG | 1532. | CGGCAGGTTGG | 1643 | CGG | 3 |
| | | | | | | | | ACTGTGAAC | | TGACTGTGAAC | | | |
| | | | | | | | | GC | | GCCGGCTT | | | |
| SRF | IL2RA | IL2RA low | 6722 | NM_003131.3 | NC_000006.12 | 43172119 | sense | AGTTCATCG | 1533. | ATGGAGTTCAT | 1644 | CGG | 1 |
| | | | | | | | | ACAACAAGC | | CGACAACAAGC | | | |
| | | | | | | | | TG | | TGCGGCGC | | | |
| SRF | IL2RA | IL2RA low | 6722 | NM_003131.3 | NC_000006.12 | 43175844 | antisense | GGGCTGACA | 1534. | ACTGGGGCTGA | 1645 | TGG | 3 |
| | | | | | | | | CTAGCAGAC | | CACTAGCAGAC | | | |
| | | | | | | | | AC | | ACTGGTGC | | | |
| SRF | IL2RA | IL2RA low | 6722 | NM_003131.3 | NC_000006.12 | 43174015 | antisense | TCTGTTGTG | 1535. | CTGGTCTGTTGT | 1646 | GGG | 2 |
| | | | | | | | | GGGTCTGAA | | GGGGTCTGAAC | | | |
| | | | | | | | | CG | | GGGGTGG | | | |
| CEBPZ | IL2RA | L2RA low | 10153 | NM_005760.2 | NC_000002.12 | 37223251 | antisense | AAAGCTCCA | 1536. | ATATAAAGCTCC | 1647 | TGG | 3 |
| | | | | | | | | CATATAAAT | | ACATATAAATG | | | |
| | | | | | | | | GG | | GTGGCAT | | | |
| CEBPZ | IL2RA | IL2RA low | 10153 | NM_005760.2 | NC_000002.12 | 37228088 | antisense | ACAAAGCAG | 1537. | TGTTACAAAGC | 1648 | CGG | 2 |
| | | | | | | | | CTCATGAGC | | AGCTCATGAGC | | | |
| | | | | | | | | CA | | CACGGTAA | | | |
| CEBPZ | IL2RA | IL2RA low | 10153 | NM_005760.2 | NC_000002.12 | 37227623 | antisense | CAACATTAA | 1538. | AAAGCAACATT | 1649 | TGG | 2 |
| | | | | | | | | AGCCTGGAC | | AAAGCCTGGAC | | | |
| | | | | | | | | AC | | ACTGGTAT | | | |
| CEBPZ | IL2RA | IL2RA low | 10153 | NM_005760.2 | NC_000002.12 | 37228473 | sense | TGAAGGCAA | 1539. | TGGATGAAGGC | 1650 | GGG | 2 |
| | | | | | | | | TTGTGTCAT | | AATTGTGTCATC | | | |
| | | | | | | | | CG | | GGGGACA | | | |
| BATF | IL2RA | IL2RA low | 10538 | NM_006399.3 | NC_000014.9 | 75546499 | sense | ACAGAACGC | 1540. | AGAAACAGAAC | 1651 | AGG | 3 |
| | | | | | | | | GGCTCTACG | | GCGGCTCTACG | | | |
| | | | | | | | | CA | | CAAGGAGA | | | |
| BATF | IL2RA | IL2RA low | 10538 | NM_006399.3 | NC_000014.9 | 75522739 | antisense | AGGACTCTA | 1541. | AAGGAGGACTC | 1652 | GGG | 1 |
| | | | | | | | | CCTGTTTGC | | TACCTGTTTGCC | | | |
| | | | | | | | | CA | | AGGGGGA | | | |
| BATF | IL2RA | IL2RA low | 10538 | NM_006399.3 | NC_000014.9 | 75525114 | sense | ATGTGAGAA | 1542. | GATGATGTGAG | 1653 | AGG | 2 |
| | | | | | | | | GAGTTCAGA | | AAGAGTTCAGA | | | |
| | | | | | | | | GG | | GGAGGGAG | | | |
| BATF | IL2RA | IL2RA low | 10538 | NM_006399.3 | NC_000014.9 | 75546520 | sense | GGAGATCAA | 1543. | GCAAGGAGATC | 1654 | AGG | 3 |
| | | | | | | | | GCAGCTCAC | | AAGCAGCTCAC | | | |
| | | | | | | | | AG | | AGAGGAAC | | | |
| CIC | IL2RA | IL2RA low | 23152 | NM_015125.4 | NC_000019.10 | 42291060 | sense | ACTGTCACT | 1544. | TGCCACTGTCAC | 1655 | GGG | 10 |
| | | | | | | | | AACCTACTG | | TAACCTACTGGT | | | |
| | | | | | | | | GT | | GGGCAC | | | |
| CIC | IL2RA | IL2RA low | 23152 | NM_015125.4 | NC_000019.10 | 42292311 | antisense | CCCGCCCGC | 1545. | CGTGCCCGCCC | 1656 | AGG | 13 |
| | | | | | | | | TGACTGCAC | | GCTGACTGCAC | | | |
| | | | | | | | | AT | | ATAGGTGA | | | |
| CIC | IL2RA | IL2RA low | 23152 | NM_015125.4 | NC_000019.10 | 42287372 | sense | CTCTACCGC | 1546. | TTGCCTCTACCG | 1657 | CGG | 4 |
| | | | | | | | | CCGGAAAAC | | CCCGGAAAACG | | | |
| | | | | | | | | GT | | TCGGACC | | | |
| CIC | IL2RA | IL2RA low | 23152 | NM_015125.4 | NC_000019.10 | 42289198 | antisense | TTGGGCCAG | 1547. | GGCTTTGGGCC | 1658 | GGG | 8 |
| | | | | | | | | AGTACGATG | | AGAGTACGATG | | | |
| | | | | | | | | CA | | CAGGGCCA | | | |
| IKZF1 | IL2RA | IL2RA low | 10320 | NM_006060.5 | NC_000007.14 | 50376659 | sense | GAAAATGAA | 1548. | GAGAGAAAATG | 1659 | GGG | 4 |
| | | | | | | | | TGGCTCCCA | | AATGGCTCCCA | | | |
| | | | | | | | | CA | | CAGGGACC | | | |
| IKZF1 | IL2RA | IL2RA low | 10320 | NM_006060.5 | NC_000007.14 | 50399996 | antisense | GATGGCTTG | 1549. | TGTTGATGGCTT | 1660 | GGG | 8 |
| | | | | | | | | GTCCATCAC | | GGTCCATCACG | | | |
| | | | | | | | | GT | | TGGGACT | | | |
| IKZF1 | IL2RA | IL2RA low | 10320 | NM_006060.5 | NC_000007.14 | 50382586 | sense | GGGGCCTCA | 1550. | GTGCGGGGCCT | 1661 | GGG | 5 |
| | | | | | | | | TTCACCCAG | | CATTCACCCAGA | | | |
| | | | | | | | | AA | | AGGGCAA | | | |
| IKZF1 | IL2RA | IL2RA low | 10320 | NM_006060.5 | NC_000007.14 | 50327753 | sense | TCCAAGAGT | 1551. | AAGCTCCAAGA | 1662 | GGG | 3 |
| | | | | | | | | GACAGAGTC | | GTGACAGAGTC | | | |
| | | | | | | | | GT | | GTGGGTAA | | | |
| IRF4 | IL2RA | IL2RA low | 3662 | NM_001195286.1 | NC_000006.12 | 394977 | sense | CAGACCCGT | 1552. | ATCTCAGACCC | 1663 | AGG | 3 |
| | | | | | | | | ACAAAGTGT | | GTACAAAGTGT | | | |
| | | | | | | | | AC | | ACAGGATT | | | |
| IRF4 | IL2RA | IL2RA low | 3662 | NM_001195286.1 | NC_000006.12 | 397215 | sense | CCCATGACG | 1553. | ATGTCCCATGAC | 1664 | CGG | 5 |
| | | | | | | | | TTTGGACCC | | GTTTGGACCCC | | | |
| | | | | | | | | CG | | GCGGCCA | | | |
| IRF4 | IL2RA | IL2RA low | 3662 | NM_001195286.1 | NC_000006.12 | 401466 | sense | CTACCGGGA | 1554. | TGTACTACCGG | 1665 | AGG | 7 |
| | | | | | | | | AATCCTCGT | | GAAATCCTCGT | | | |
| | | | | | | | | GA | | GAAGGAGC | | | |
| IRF4 | IL2RA | IL2RA low | 3662 | NM_001195286.1 | NC_000006.12 | 393251 | sense | CTGATCGAC | 1555. | GTGGCTGATCG | 1666 | CGG | 2 |
| | | | | | | | | CAGATCGAC | | ACCAGATCGAC | | | |
| | | | | | | | | AG | | AGCGGCAA | | | |
| MBD2 | IL2RA | IL2RA low | 8932 | NM_003927.4 | NC_000018.10 | 54224170 | sense | AGCCGGTCC | 1556. | CGGGAGCCGGT | 1667 | GGG | 1 |
| | | | | | | | | CTTTCCCGTC | | CCCTTTCCCGTC | | | |
| | | | | | | | | G | | GGGGAGC | | | |
| MBD2 | IL2RA | IL2RA low | 8932 | NM_003927.4 | NC_000018.10 | 54205113 | sense | CCTCAGTTG | 1557. | CAAGCCTCAGTT | 1668 | GGG | 2 |
| | | | | | | | | GCAAGGTAC | | GGCAAGGTACC | | | |
| | | | | | | | | CT | | TGGGAAA | | | |
| MBD2 | IL2RA | IL2RA low | 8932 | NM_003927.4 | NC_000018.10 | 54204999 | sense | CCTCTCAATC | 1558. | CGATCCTCTCAA | 1669 | TGG | 2 |
| | | | | | | | | AAAATAAGG | | TCAAAATAAGG | | | |
| | | | | | | | | T | | TTGGTTA | | | |
| MBD2 | IL2RA | IL2RA low | 8932 | NM_003927.4 | NC_000018.10 | 54224048 | sense | CGAAAATCT | 1559. | GATCCGAAAAT | 1670 | TGG | 1 |
| | | | | | | | | GGGCTAAGT | | CTGGGCTAAGT | | | |
| | | | | | | | | GC | | GCTGGCAA | | | |
| JAK3 | IL2RA | IL2RA low | 3718 | NM_000215.3 | NC_000019.10 | 17835098 | antisense | ACTCTCCAG | 1560. | ACTTACTCTCCA | 1671 | CGG | 15 |
| | | | | | | | | GCTTAACAC | | GGCTTAACACA | | | |
| | | | | | | | | AG | | GCGGGGC | | | |
| JAK3 | IL2RA | IL2RA low | 3718 | NM_000215.3 | NC_000019.10 | 17839577 | antisense | AGCTCTCGA | 1561. | CAGGAGCTCTC | 1672 | GGG | 10 |
| | | | | | | | | AGACTGCTG | | GAAGACTGCTG | | | |
| | | | | | | | | TG | | TGGGGTCG | | | |
| JAK3 | IL2RA | IL2RA low | 3718 | NM_000215.3 | NC_000019.10 | 17836043 | antisense | GTGTACAAA | 1562. | CCAGGTGTACA | 1673 | TGG | 14 |
| | | | | | | | | TTCCTGCAC | | AATTCCTGCACC | | | |
| | | | | | | | | CA | | ATGGTGC | | | |
| JAK3 | IL2RA | IL2RA low | 3718 | NM_000215.3 | NC_000019.10 | 17842538 | sense | TGACGCGGA | 1563. | TTCGTGACGCG | 1674 | AGG | 6 |
| | | | | | | | | GGCGTATTC | | GAGGCGTATTC | | | |
| | | | | | | | | GG | | GGAGGACG | | | |
| BCL6 | IL2RA | IL2RA low | 604 | NM_001706.4 | NC_000003.12 | 1.88E+08 | sense | AAGTGATAT | 1564. | CACGAAGTGAT | 1675 | TGG | 5 |
| | | | | | | | | GCACTACAG | | ATGCACTACAG | | | |
| | | | | | | | | TG | | TGTGGCTG | | | |
| BCL6 | IL2RA | IL2RA low | 604 | NM_001706.4 | NC_000003.12 | 1.88E+08 | sense | CAAGACATC | 1565. | GCCCCAAGACA | 1676 | GGG | 5 |
| | | | | | | | | ATGGCCTAT | | TCATGGCCTATC | | | |
| | | | | | | | | CG | | GGGGTCG | | | |
| BCL6 | IL2RA | IL2RA low | 604 | NM_001706.4 | NC_000003.12 | 1.88E+08 | antisense | CATCTGCAG | 1566. | GCTCCATCTGCA | 1677 | TGG | 4 |
| | | | | | | | | GTACATAGC | | GGTACATAGCC | | | |
| | | | | | | | | CG | | GTGGCCA | | | |
| BCL6 | IL2RA | IL2RA low | 604 | NM_001706.4 | NC_000003.12 | 1.88E+08 | antisense | TCCCTCACCT | 1567. | CAGATCCCTCAC | 1678 | AGG | 3 |
| | | | | | | | | GCAGGCCAT | | CTGCAGGCCAT | | | |
| | | | | | | | | G | | GAGGACC | | | |
| ZNF236 | IL2RA | IL2RA low | 7776 | NM_007345.3 | NC_000018.10 | 76919836 | sense | ATCACGGAA | 1568. | ATGCATCACGG | 1679 | AGG | 20 |
| | | | | | | | | GTCTCGTCC | | AAGTCTCGTCCT | | | |
| | | | | | | | | TG | | GAGGTCA | | | |
| ZNF236 | IL2RA | IL2RA low | 7776 | NM_007345.3 | NC_000018.10 | 76913812 | sense | GCATGTGCG | 1569. | AGCAGCATGTG | 1680 | GGG | 18 |
| | | | | | | | | GTCGCACAC | | CGGTCGCACAC | | | |
| | | | | | | | | CG | | CGGGGAAA | | | |
| ZNF236 | IL2RA | IL2RA low | 7776 | NM_007345.3 | NC_000018.10 | 76905317 | sense | GGCAGCTTA | 1570. | TGGTGGCAGCT | 1681 | GGG | 13 |
| | | | | | | | | CGGCGACAC | | TACGGCGACAC | | | |
| | | | | | | | | AT | | ATGGGTAT | | | |
| ZNF236 | IL2RA | IL2RA low | 7776 | NM_007345.3 | NC_000018.10 | 76910097 | antisense | TGGTCTACG | 1571. | AAACTGGTCTA | 1682 | AGG | 15 |
| | | | | | | | | TGCCCTCGC | | CGTGCCCTCGC | | | |
| | | | | | | | | AG | | AGAGGGTC | | | |
| TCF3 | IL2RA | IL2RA low | 6929 | NM_003200.3 | NC_000019.10 | 1622055 | sense | CACCAGCAC | 1572. | CCTGCACCAGC | 1683 | AGG | 10 |
| | | | | | | | | GAGCGTATG | | ACGAGCGTATG | | | |
| | | | | | | | | GT | | GTAGGACC | | | |
| TCF3 | IL2RA | IL2RA low | 6929 | NM_003200.3 | NC_000019.10 | 1622322 | sense | CTATCCCGC | 1573. | GCACCTATCCCG | 1684 | TGG | 9 |
| | | | | | | | | CCCCTTCTAC | | CCCCCTTCTACG | | | |
| | | | | | | | | G | | TGGCAG | | | |
| TCF3 | IL2RA | IL2RA low | 6929 | NM_003200.3 | NC_000019.10 | 1619821 | antisense | GCTGGGCGA | 1574. | CGTAGCTGGGC | 1685 | GGG | 14 |
| | | | | | | | | TAAGGCACC | | GATAAGGCACC | | | |
| | | | | | | | | GG | | GGGGGCTC | | | |
| TCF3 | IL2RA | IL2RA low | 6929 | NM_003200.3 | NC_000019.10 | 1621034 | antisense | GTTATTGCTT | 1575. | AGAAGTTATTG | 1686 | GGG | 13 |
| | | | | | | | | GAGTGATCC | | CTTGAGTGATCC | | | |
| | | | | | | | | G | | GGGGAGT | | | |
| YY1 | IL2RA | IL2RA low | 7528 | NM_003403.4 | NC_000014.9 | 1E+08 | sense | AGATATTGA | 1576. | AAAAAGATATT | 1687 | TGG | 2 |
| | | | | | | | | CCATGAGAC | | GACCATGAGAC | | | |
| | | | | | | | | AG | | AGTGGTTG | | | |
| YY1 | IL2RA | IL2RA low | 7528 | NM_003403.4 | NC_000014.9 | 1E+08 | sense | GGAGACCAT | 1577. | CGGTGGAGACC | 1688 | TGG | 1 |
| | | | | | | | | CGAGACCAC | | ATCGAGACCAC | | | |
| | | | | | | | | AG | | AGTGGTGG | | | |
| YY1 | IL2RA | IL2RA low | 7528 | NM_003403.4 | NC_000014.9 | 1E+08 | sense | GGTCACCGA | 1578. | CGCTGGTCACC | 1689 | AGG | 1 |
| | | | | | | | | CGACCCGAC | | GACGACCCGAC | | | |
| | | | | | | | | CC | | CCAGGTGC | | | |
| YY1 | IL2RA | IL2RA low | 7528 | NM_003403.4 | NC_000014.9 | 1E+08 | sense | TGAACAAAC | 1579. | ACATTGAACAA | 1690 | TGG | 1 |
| | | | | | | | | GCTGGTCAC | | ACGCTGGTCAC | | | |
| | | | | | | | | CG | | CGTGGCGG | | | |
| PURA | IL2RA | IL2RA low | 5813 | NM_005859.4 | NC_000005.10 | 1.4E+08 | sense | CCTTACTCTC | 1580. | GCCGCCTTACTC | 1691 | TGG | 1 |
| | | | | | | | | TCCATGTCA | | TCTCCATGTCAG | | | |
| | | | | | | | | G | | TGGCCG | | | |
| PURA | IL2RA | IL2RA low | 5813 | NM_005859.4 | NC_000005.10 | 1.4E+08 | antisense | GAACTCGAT | 1581. | CACGGAACTCG | 1692 | CGG | 1 |
| | | | | | | | | GAGCCCCTG | | ATGAGCCCCTG | | | |
| | | | | | | | | CG | | CGCGGGCA | | | |
| PURA | IL2RA | IL2RA low | 5813 | NM_005859.4 | NC_000005.10 | 1.4E+08 | sense | GCTCATCGA | 1582. | CCAAGCTCATC | 1693 | TGG | 1 |
| | | | | | | | | CGACTACGG | | GACGACTACGG | | | |
| | | | | | | | | AG | | AGTGGAGG | | | |
| PURA | IL2RA | IL2RA low | 5813 | NM_005859.4 | NC_000005.10 | 1.4E+08 | sense | TCCGCCAGA | 1583. | CGCATCCGCCA | 1694 | GGG | 1 |
| | | | | | | | | CGGTCAACC | | GACGGTCAACC | | | |
| | | | | | | | | GG | | GGGGGCCT | | | |

TABLE 9
Nuclear factors that can be inhibited to increase IL2RA expression or overexpressed to decrease IL2RA expression
specifically in effector T cells

| | | | | | | Position | | | | | | | | |
|---|---|---|---|---|---|---|---|---|---|---|---|---|---|---|
| | | | Tar- | | | of Base | | | | | | | | |
| | | | get | | | After | | sgRNA | SEQ | Target | SEQ | | | Rule |
| gene_ | screen | screen | Gene | Target | Genomic | Cut (1- | | Target | ID | Context | ID | PAM | Exon | Set 2 |
| id | target | direction | ID | Transcript | Sequence | based) | Strand | Sequence | NO: | Sequence | NO: | Sequence | Number | score |
| CTCF | IL2RA Teffs | IL2RA high | 10664 | NM_006565.3 | NC_000016.10 | 67612001 | antisense | CGATCCAA | 1695. | GTGACGAT | 1743. | TGG | 4 | 0.6364 |
| | | | | | | | | ATTTGAAC | | CCAAATTT | | | | |
| | | | | | | | | GCCG | | GAACGCC | | | | |
| | | | | | | | | | | GTGGACA | | | | |
| CTCF | IL2RA Teffs | IL2RA high | 10664 | NM_006565.3 | NC_000016.10 | 67611476 | sense | GAGCAAA | 1696. | AAAAGAG | 1744. | AGG | 3 | 0.6793 |
| | | | | | | | | CTGCGTTA | | CAAACTGC | | | | |
| | | | | | | | | TACAG | | GTTATACA | | | | |
| | | | | | | | | | | GAGGAGG | | | | |
| CTCF | IL2RA Teffs | IL2RA high | 10664 | NM_006565.3 | NC_000016.10 | 67610967 | sense | TTACCCCA | 1697. | CCACTTAC | 1745. | TGG | 3 | 0.6378 |
| | | | | | | | | GAACCAG | | CCCAGAAC | | | | |
| | | | | | | | | ACGGA | | CAGACGG | | | | |
| | | | | | | | | | | ATGGGGG | | | | |
| CTCP | IL2RA Teffs | IL2RA high | 10664 | NM_006565.3 | NC_000016.10 | 67620773 | sense | TTTGTGCA | 1698. | GCAGTTTG | 1746. | GGG | 6 | 0.6444 |
| | | | | | | | | GTTATGCC | | TGCAGTTA | | | | |
| | | | | | | | | AGCA | | TGCCAGCA | | | | |
| | | | | | | | | | | GGGACA | | | | |
| PTPRC | IL2RA Teffs | IL2RA high | 5788 | NM_002838.4 | NC_000001.11 | 1.99E+08 | antisense | AGCATTAT | 1699. | CACTAGCA | 1747. | GGG | 4 | 0.6692 |
| | | | | | | | | CCAAAGA | | TTATCCAA | | | | |
| | | | | | | | | GTCCG | | AGAGTCC | | | | |
| | | | | | | | | | | GGGGATA | | | | |
| PTPRC | IL2RA Teffs | IL2RA high | 5788 | NM_002838.4 | NC_000001.11 | 1.99E+08 | antisense | GGAAACTT | 1700. | TATAGGAA | 1748. | CGG | 19 | 0.6482 |
| | | | | | | | | GCTGAACA | | ACTTGCTG | | | | |
| | | | | | | | | CCCG | | AACACCCG | | | | |
| | | | | | | | | | | CGGGAT | | | | |
| PTPRC | IL2RA Teffs | IL2RA high | 5788 | NM_002838.4 | NC_000001.11 | 1.99E+08 | antisense | TCCAAATG | 1701. | AACTTCCA | 1749. | GGG | 14 | 0.6167 |
| | | | | | | | | GTAACGTT | | AATGGTAA | | | | |
| | | | | | | | | CATG | | CGTTCATG | | | | |
| | | | | | | | | | | GGGGCC | | | | |
| PTPRC | IL2RA Teffs | IL2RA high | 5788 | NM_002838.4 | NC_000001.11 | 1.99E+08 | sense | TGTGGATT | 1702. | TCACTGTG | 1750. | AGG | 9 | 0.6937 |
| | | | | | | | | ACTTATAT | | GATTACTT | | | | |
| | | | | | | | | AACA | | ATATAACA | | | | |
| | | | | | | | | | | AGGAAA | | | | |
| NR2C2 | IL2RA Teffs | IL2RA high | 7182 | NM_003298.4 | NC_000003.12 | 15030406 | sense | CCAGTCGA | 1703. | GAGACCA | 1751. | AGG | 10 | 0.6976 |
| | | | | | | | | CACCCATC | | GTCGACAC | | | | |
| | | | | | | | | ATTG | | CCATCATT | | | | |
| | | | | | | | | | | GAGGTTG | | | | |
| NR2C2 | IL2RA Teffs | IL2RA high | 7182 | NM_003298.4 | NC_000003.12 | 15016174 | antisense | CCCCAGTA | 1704. | TCTTCCCC | 1752. | AGG | 5 | 0.7308 |
| | | | | | | | | AACGCTCC | | AGTAAAC | | | | |
| | | | | | | | | ACAG | | GCTCCACA | | | | |
| | | | | | | | | | | GAGGCAG | | | | |
| NR2C2 | IL2RA Teffs | IL2RA high | 7182 | NM_003298.4 | NC_000003.12 | 15024201 | antisense | GAACGTCA | 1705. | TAGAGAA | 1753. | TGG | 8 | 0.6168 |
| | | | | | | | | CCTTAGAA | | CGTCACCT | | | | |
| | | | | | | | | TCCG | | TAGAATCC | | | | |
| | | | | | | | | | | GTGGCCA | | | | |
| NR2C2 | IL2RA Teffs | IL2RA high | 7182 | NM_003298.4 | NC_000003.12 | 15023322 | antisense | TCTTTGTC | 1706. | TCCATCTT | 1754. | GGG | 7 | 0.6618 |
| | | | | | | | | TGCCACAA | | TGTCTGCC | | | | |
| | | | | | | | | ACGT | | ACAAACGT | | | | |
| | | | | | | | | | | GGGAGT | | | | |
| TP53 | IL2RA Teffs | IL2RA high | 7157 | NM_000546.5 | NC_000017.11 | 7676227 | antisense | CCATTGTT | 1707. | TGAACCAT | 1755. | GGG | 4 | 0.6899 |
| | | | | | | | | CAATATCG | | TGTTCAAT | | | | |
| | | | | | | | | TCCG | | ATCGTCCG | | | | |
| | | | | | | | | | | GGGACA | | | | |
| TP53 | IL2RA Teffs | IL2RA high | 7157 | NM_000546.5 | NC_000017.11 | 7675058 | sense | GAGCGCT | 1708. | CCATGAGC | 1756. | TGG | 5 | 0.6542 |
| | | | | | | | | GCTCAGAT | | GCTGCTCA | | | | |
| | | | | | | | | AGCGA | | GATAGCG | | | | |
| | | | | | | | | | | ATGGTGA | | | | |
| TP53 | IL2RA Teffs | IL2RA high | 7157 | NM_000546.5 | NC_000017.11 | 7676527 | antisense | GATCCACT | 1709. | AATGGATC | 1757. | AGG | 2 | 0.6108 |
| | | | | | | | | CACAGTTT | | CACTCACA | | | | |
| | | | | | | | | CCAT | | GTTTCCAT | | | | |
| | | | | | | | | | | AGGTCT | | | | |
| TP53 | IL2RA Teffs | IL2RA high | 7157 | NM_000546.5 | NC_000017.11 | 7674864 | sense | GGTGCCCT | 1710. | TGGTGGT | 1758. | AGG | 6 | 0.6259 |
| | | | | | | | | ATGAGCC | | GCCCTATG | | | | |
| | | | | | | | | GCCTG | | AGCCGCCT | | | | |
| | | | | | | | | | | GAGGTCT | | | | |
| PRDM1 | IL2RA Teffs | IL2RA high | 639 | NM_001198.3 | NC_000006.12 | 1.06E+08 | sense | AGGATGC | 1711. | ATGGAGG | 1759. | TGG | 2 | 0.7731 |
| | | | | | | | | GGATATG | | ATGCGGAT | | | | |
| | | | | | | | | ACTCTG | | ATGACTCT | | | | |
| | | | | | | | | | | GTGGACA | | | | |
| PRDM1 | IL2RA Teffs | IL2RA high | 639 | NM_001198.3 | NC_000006.12 | 1.06E+08 | antisense | GGACGCG | 1712. | CGTAGGA | 1760. | AGG | 5 | 0.6665 |
| | | | | | | | | TTCAAGTA | | CGCGTTCA | | | | |
| | | | | | | | | AGCGT | | AGTAAGC | | | | |
| | | | | | | | | | | GTAGGAG | | | | |
| | | | | | | | | | | T | | | | |
| PRDM1 | IL2RA Teffs | IL2RA high | 639 | NM_001198.3 | NC_000006.12 | 1.06E+08 | antisense | GGGGAGC | 1713. | AATGGGG | 1761. | GGG | 5 | 0.6871 |
| | | | | | | | | GAGTGAT | | GAGCGAG | | | | |
| | | | | | | | | GTACGT | | TGATGTAC | | | | |
| | | | | | | | | | | GTGGGTCT | | | | |
| PRDM1 | IL2RA Teffs | IL.2RA high | 639 | NM_001198.3 | NC_000006.12 | 1.06E+08 | sense | TTTGGACA | 1714. | CTCTTTTG | 1762. | AGG | 4 | 0.6708 |
| | | | | | | | | GATCTATT | | GACAGATO | | | | |
| | | | | | | | | CCAG | | TATTCCAG | | | | |
| | | | | | | | | | | AGGGGA | | | | |
| MYC | IL2RA Teffs | IL2RA high | 4609 | NM_002467.4 | NC_000008.11 | 1.28E+08 | sense | AGAGTGC | 1715. | CCTCAGAG | 1763. | TGG | 2 | 0.6543 |
| | | | | | | | | ATCGACCC | | TGCATCGA | | | | |
| | | | | | | | | CTCGG | | CCCCTCGG | | | | |
| | | | | | | | | | | TGGTCT | | | | |
| MYC | IL2RA Teffs | IL2RA high | 4609 | NM_002467.4 | NC_000008.11 | 1.28E+08 | antisense | CTGCGGG | 1716. | TGCCCTGC | 1764, | AGG | 2 | 0.6832 |
| | | | | | | | | GAGGACT | | GGGGAGG | | | | |
| | | | | | | | | CCGTCG | | ACTCCGTC | | | | |
| | | | | | | | | | | GAGGAGA | | | | |
| MYC | IL2RA Teffs | IL2RA high | 4609 | NM_002467.4 | NC_000008.11 | 1.28E+08 | sense | CTTCGGGG | 1717. | CTCCCTTC | 1765. | CGG | 2 | 0.6919 |
| | | | | | | | | AGACAAC | | GGGGAGA | | | | |
| | | | | | | | | GACGG | | CAACGAC | | | | |
| | | | | | | | | | | GGCGGTG | | | | |
| | | | | | | | | | | G | | | | |
| MYC | IL2RA Teffs | IL2RA high | 4609 | NM_002467.4 | NC_000008.11 | 1.28E+08 | antisense | GCTGCACC | 1718. | TACGGCTG | 1766. | AGG | 2 | 0.6842 |
| | | | | | | | | GAGTOGTA | | CACCGAGT | | | | |
| | | | | | | | | GTCG | | CGTAGTCG | | | | |
| | | | | | | | | | | AGGTCA | | | | |
| SMARCB1 | IL2RA Teffs | IL2RA high | 6598 | NM_003073.3 | NC_000022.11 | 23791773 | antisense | GAGAACCT | 1719. | TACAGAG | 1767. | AGG | 2 | 0.731 |
| | | | | | | | | CGGAACAT | | AACCTCGG | | | | |
| | | | | | | | | ACGG | | AACATACG | | | | |
| | | | | | | | | | | GAGGTAG | | | | |
| SMARCB1 | IL2RA Teffs | IL2RA high | 6598 | NM_003073.3 | NC_000022.11 | 23816887 | sense | GCAGATC | 1720. | GACAGCA | 1768. | CGG | 6 | 0.6894 |
| | | | | | | | | GAGTCCTA | | GATCGAGT | | | | |
| | | | | | | | | CCCCA | | CCTACCCC | | | | |
| | | | | | | | | | | ACGGACA | | | | |
| SMARCB1 | IL2RA Teffs | IL2RA high | 6598 | NM_003073.3 | NC_000022.11 | 23801049 | antisense | TCTTCTTG | 1721. | GTTCTCTT | 1769. | CGG | 4 | 0.6806 |
| | | | | | | | | TCTCGGCC | | CTTGTCTC | | | | |
| | | | | | | | | CATG | | GGCCCATG | | | | |
| | | | | | | | | | | CGGTTC | | | | |
| SMARCB1 | IL2RA Teffs | IL2RA high | 6598 | NM_003073.3 | NC_000022.11 | 23803342 | sense | TGAGAAC | 1722. | TCCATGAG | 1770. | AGG | 5 | 0.6804 |
| | | | | | | | | GCATCTCA | | AACGCATC | | | | |
| | | | | | | | | GCCCG | | TCAGCCCG | | | | |
| | | | | | | | | | | AGGTGC | | | | |
| IRF1 | IL2RA Teffs | IL2RA high | 3659 | NM_002198.2 | NC_000005.10 | 1.32E+08 | sense | GAACTCCC | 1723. | CCATGAAC | 1771. | AGG | 4 | 0.6297 |
| | | | | | | | | TGCCAGAT | | TCCCTGCC | | | | |
| | | | | | | | | ATCG | | AGATATCG | | | | |
| | | | | | | | | | | AGGAGG | | | | |
| IRF1 | IL2RA Teffs | IL2RA high | 3659 | NM_002198.2 | NC_000005.10 | 1.32E+08 | sense | TCTAGGCC | 1724. | GCCCTCTA | 1772. | GGG | 4 | 0.718 |
| | | | | | | | | GATACAAA | | GGCCGAT | | | | |
| | | | | | | | | GCAG | | ACAAAGC | | | | |
| | | | | | | | | | | AGGGGAA | | | | |
| | | | | | | | | | | A | | | | |
| IRF1 | IL2RA Teffs | IL2RA high | 3659 | NM_002198.2 | NC_000005.10 | 1.32E+08 | sense | TCTCCCTC | 1725. | GCTTTCTC | 1773. | GGG | 6 | 0.6137 |
| | | | | | | | | GACAGTCA | | CCTCGACA | | | | |
| | | | | | | | | TGTG | | GTCATGTG | | | | |
| | | | | | | | | | | GGGATT | | | | |
| IRF1 | IL2RA Teffs | IL2RA high | 3659 | NM_002198.2 | NC_000005.10 | 1.32E+08 | sense | TTAATTCC | 1726. | CAGATTAA | 1774. | GGG | 2 | 0.7113 |
| | | | | | | | | AACCAAAT | | TTCCAACC | | | | |
| | | | | | | | | CCCG | | AAATCCCG | | | | |
| | | | | | | | | | | GGGCTC | | | | |
| IRF2 | IL2RA Teffs | IL2RA high | 3660 | NM_002199.3 | NC_000004.12 | 1.84E+08 | sense | ACCTGATC | 1727. | ATAAACCT | 1775. | AGG | 4 | 0.6049 |
| | | | | | | | | CCAAAACA | | GATCCCAA | | | | |
| | | | | | | | | TGGA | | AACATGG | | | | |
| | | | | | | | | | | AAGGCGA | | | | |
| IRF2 | IL2RA Teffs | IL2RA high | 3660 | NM_002199.3 | NC_000004.12 | 1.84E+08 | antisense | CAGCATTC | 1728. | GGGGCAG | 1776. | AGG | 4 | 0.6028 |
| | | | | | | | | GGTAGAC | | CATTCGGT | | | | |
| | | | | | | | | CCTGA | | AGACCCTG | | | | |
| | | | | | | | | | | AAGGCAT | | | | |
| IRF2 | IL2RA Teffs | IL2RA high | 3660 | NM_002199.3 | NC_000004.12 | 1.84E+08 | sense | GGATGCAT | 1729. | CCCTGGAT | 1777. | GGG | 3 | 0.6231 |
| | | | | | | | | GCGGCTA | | GCATGCG | | | | |
| | | | | | | | | GACAT | | GCTAGACA | | | | |
| | | | | | | | | | | TGGGTGG | | | | |
| IRF2 | IL2RA Teffs | IL2RA high | 3660 | NM_002199.3 | NC_000004.12 | 1.84E+08 | antisense | TACCTGCA | 1730. | CGCTTACC | 1778. | GGG | 7 | 0.7207 |
| | | | | | | | | TAGGAAG | | TGCATAGG | | | | |
| | | | | | | | | ACACG | | AAGACAC | | | | |
| | | | | | | | | | | GGGGGAG | | | | |
| TNFAIP3 | IL2RA Teffs | IL2RA high | 7128 | NM_001270507.1 | NC_000006.12 | 1.38E+08 | sense | CCACTTGT | 1731. | TGTTCCAC | 1779. | GGG | 6 | 0.6901 |
| | | | | | | | | TAACAGA | | TTGTTAAC | | | | |
| | | | | | | | | GACCG | | AGAGACC | | | | |
| | | | | | | | | | | GGGGAAG | | | | |
| TNFAIP3 | IL2RA Teffs | IL2RA high | 7128 | NM_001270507.1 | NC_000006.12 | 1.38E+08 | sense | CTTGTGGC | 1732. | GAAGCTTG | 1780. | CGG | 2 | 0.6709 |
| | | | | | | | | GCTGAAA | | TGGCGCTG | | | | |
| | | | | | | | | ACGAA | | AAAACGA | | | | |
| | | | | | | | | | | ACGGTAA | | | | |
| TNFAIP3 | IL2RA Teffs | IL2RA high | 7128 | NM_001270507.1 | NC_000006.12 | 1.38E+08 | sense | TATGCCAT | 1733. | CCTTTATG | 1781. | AGG | 7 | 0.7533 |
| | | | | | | | | GAGTGCTC | | CCATGAGT | | | | |
| | | | | | | | | AGAG | | GCTCAGA | | | | |
| | | | | | | | | | | GAGGCGG | | | | |
| TNFAIP3 | IL2RA Teffs | IL2RA high | 7128 | NM_001270507.1 | NC_000006.12 | 1.38E+08 | antisense | TGAGAGA | 1734. | GATTTGAG | 1782. | CGG | 3 | 0.6393 |
| | | | | | | | | CTCCAGTT | | AGACTCCA | | | | |
| | | | | | | | | GCCAG | | GTTGCCAG | | | | |
| | | | | | | | | | | CGGAAT | | | | |
| HIVEP2 | IL2RA Teffs | IL2RA high | 3097 | NM_006734.3 | NC_000006.12 | 1.43E+08 | antisense | CCCTGGAT | 1735. | CGGTCCCT | 1783. | CGG | 5 | 0.6747 |
| | | | | | | | | AGAATACA | | GGATAGA | | | | |
| | | | | | | | | TCGT | | ATACATCG | | | | |
| | | | | | | | | | | TCGGAAC | | | | |
| HIVEP2 | IL2RA Teffs | IL2RA high | 3097 | NM_006734.3 | NC_000006.12 | 1.43E+08 | sense | GACAAGA | 1736. | TTCAGACA | 1784. | GGG | 5 | 0.7382 |
| | | | | | | | | TGTCAGAC | | AGATGTCA | | | | |
| | | | | | | | | CTAGG | | GACCTAG | | | | |
| | | | | | | | | | | GGGGCAG | | | | |
| HIVEP2 | IL2RA Teffs | IL2RA high | 3097 | NM_006734.3 | NC_000006.12 | 1.43E+08 | antisense | GAGGTGG | 1737. | GTCAGAG | 1785. | GGG | 5 | 0.6922 |
| | | | | | | | | AAGGTAA | | GTGGAAG | | | | |
| | | | | | | | | ACACAA | | GTAAACAC | | | | |
| | | | | | | | | | | AAGGGGA | | | | |
| | | | | | | | | | | T | | | | |
| HIVEP2 | IL2RA Teffs | IL2RA high | 3097 | NM_006734.3 | NC_000006.12 | 1.43E+08 | antisense | TTCTAGGA | 1738. | TTTTTTCTA | 1786. | TGG | 5 | 0.71 |
| | | | | | | | | TAACCACC | | GGATAACC | | | | |
| | | | | | | | | ACTG | | ACCACTGT | | | | |
| | | | | | | | | | | GGCCA | | | | |
| MED12 | IL2RA Teffs | IL2RA high | 9968 | NM_005120.2 | NC_000023.11 | 71130165 | sense | ACATCGAC | 1739. | ATCCACAT | 1787. | AGG | 28 | 0.6457 |
| | | | | | | | | TGCTGGAC | | CGACTGCT | | | | |
| | | | | | | | | AATG | | GGACAAT | | | | |
| | | | | | | | | | | GAGGATG | | | | |
| MED12 | IL2RA Teffs | IL2RA high | 9968 | NM_005120.2 | NC_000023.11 | 71122231 | antisense | CAGTGAGT | 1740. | CAGTCAGT | 1788. | AGG | 8 | 0.688 |
| | | | | | | | | AGTGCCAA | | GAGTAGT | | | | |
| | | | | | | | | ACCA | | GCCAAACC | | | | |
| | | | | | | | | | | AAGGCAC | | | | |
| MED12 | IL2RA Teffs | IL2RÅ high | 9968 | NM_005120.2 | NC_000023.11 | 71125111 | antisense | GTGGCGT | 1741. | ATGGGTG | 1789. | TGG | 15 | 0.6661 |
| | | | | | | | | ACTGCACG | | GCGTACTG | | | | |
| | | | | | | | | TGTCG | | CACGTGTC | | | | |
| | | | | | | | | | | GTGGCTG | | | | |
| MED12 | IL2RA Teffs | IL2RA high | 9968 | NM_005120.2 | NC_000023.11 | 71126138 | sense | TTCACATT | 1742. | ACCTTTCA | 1790. | AGG | 18 | 0.6594 |
| | | | | | | | | ATGACCAA | | CATTATGA | | | | |
| | | | | | | | | CACC | | CCAACACC | | | | |
| | | | | | | | | | | AGGTCA | | | | |

TABLE 10
Nuclear factors that can be inhibited to decrease IL2RA expression or overexpressed to increase IL2RA expression
specifically in effector T cells

| | | | | | | Position | | | | | | | | |
|---|---|---|---|---|---|---|---|---|---|---|---|---|---|---|
| | | | | | | of Base | | | | | | | | |
| | | | | | | After | | sgRNA | | Target | | | | Rule |
| | screen_ | screen_ | Target | Target | Genomic | Cut (1- | | Target | SEQ ID | Context | SEQ | PAM | Exon | Set 2 |
| gene_id | target | direction | Gene ID | Transcript | Sequence | based | Strand | Sequence | NO:: | Sequence | ID NO: | Sequence | Number | score |
| GATA3 | IL2RA Teffs | IL2RA low | 2625 | NM_002051.2 | NC_000010.11 | 8055892 | sense | AGGTACCC | 1791. | GCAGAGG | 1879. | CGG | 2 | 0.6857 |
| | | | | | | | | TCCGACCC | | TACCCTCC | | | | |
| | | | | | | | | ACCA | | GACCCACC | | | | |
| | | | | | | | | | | ACGGTGA | | | | |
| GATA3 | IL2RA Teffs | IL2RA low | 2625 | NM_002051.2 | NC_000010.11 | 8064014 | sense | CAGGGAG | 1792. | AAGGCAG | 1880. | GGG | 4 | 0.737 |
| | | | | | | | | TGTGTGAA | | GGAGTGT | | | | |
| | | | | | | | | CTGTG | | GTGAACTG | | | | |
| | | | | | | | | | | TGGGGCA | | | | |
| | | | | | | | | | | A | | | | |
| GATA3 | IL2RA Teffs | IL2RA low | 2625 | NM_002051.2 | NC_000010.11 | 8058740 | antisense | GGAGCTG | 1793. | GTCCGGA | 1881. | AGG | 3 | 0.6273 |
| | | | | | | | | TACTCGGG | | GCTGTACT | | | | |
| | | | | | | | | CACGT | | CGGGCAC | | | | |
| | | | | | | | | | | GTAGGGC | | | | |
| | | | | | | | | | | G | | | | |
| GATA3 | IL2RA Teffs | IL2RA low | 2625 | NM_002051.2 | NC_000010.11 | 8058432 | sense | TCCAAGAC | 1794. | CTTCTCCA | 1882. | CGG | 3 | 0.7243 |
| | | | | | | | | GTCCATCC | | AGACGTCC | | | | |
| | | | | | | | | ACCA | | ATCCACCA | | | | |
| | | | | | | | | | | CGGCTC | | | | |
| KMT2A | IL2RA Teffs | IL2RA low | 4297 | NM_005933.3 | NC_000011.10 | 1.19E+08 | antisense | AAGATCA | 1795. | ATTCAAGA | 1883. | TGG | 27 | 0.7172 |
| | | | | | | | | GTAGCGG | | TCAGTAGC | | | | |
| | | | | | | | | TCCCGG | | GGTCCCG | | | | |
| | | | | | | | | | | GTGGTGG | | | | |
| KMT2A | IL2RA Teffs | IL2RA low | 4297 | NM_005933.3 | NC_000011.10 | 1.18E+08 | sense | AGAAAGG | 1796. | GTAAAGA | 1884. | CGG | 5 | 0.6636 |
| | | | | | | | | ACGTCGAT | | AAGGACG | | | | |
| | | | | | | | | CGAGG | | TCGATCGA | | | | |
| | | | | | | | | | | GGCGGTG | | | | |
| | | | | | | | | | | T | | | | |
| KMT2A | IL2RA Teffs | IL2RA low | 4297 | NM_005933.3 | NC_000011.10 | 1.18E+08 | antisense | AGGGGTC | 1797. | GCCGAGG | 1885. | AGG | 3 | 0.757 |
| | | | | | | | | TTAATGAT | | GGTCTTAA | | | | |
| | | | | | | | | CCGCG | | TGATCCGC | | | | |
| | | | | | | | | | | GAGGAGA | | | | |
| KMT2A | IL2RA Teffs | IL2RA low | 4297 | NM_005933.3 | NC_000011.10 | 1.18E+08 | sense | TTGACCAT | 1798. | TCACTTGA | 1886. | TGG | 19 | 0.7229 |
| | | | | | | | | AATTATGC | | CCATAATT | | | | |
| | | | | | | | | TCAG | | ATGCTCAG | | | | |
| | | | | | | | | | | TGGCAG | | | | |
| ETS1 | IL2RA Teffs | IL2RA low | 2113 | NM_005238.3 | NC_000011.10 | 1.28E+08 | antisense | CTTACTAA | 1799. | TGAACTTA | 1887. | AGG | 4 | 0.6808 |
| | | | | | | | | TGAAGTAA | | CTAATGAA | | | | |
| | | | | | | | | TCCG | | GTAATCCG | | | | |
| | | | | | | | | | | AGGTAT | | | | |
| ETS1 | IL2RA Teffs | IL2RA low | 2113 | NM_005238.3 | NC_000011.10 | 1.28E+08 | antisense | GAGAAAG | 1800. | GCTCGAG | 1888. | GGG | 3 | 0.6487 |
| | | | | | | | | CAGTCTTT | | AAAGCAG | | | | |
| | | | | | | | | ACCCA | | TCTTTACC | | | | |
| | | | | | | | | | | CAGGGCG | | | | |
| | | | | | | | | | | C | | | | |
| ETS1 | IL2RA Teffs | IL2RA low | 2113 | NM_005238.3 | NC_000011.10 | 1.28E+08 | antisense | GGTCTCGG | 1801. | AGAGGGT | 1889. | GGG | 5 | 0.7649 |
| | | | | | | | | AGAATGA | | CTCGGAG | | | | |
| | | | | | | | | CCGAG | | AATGACCG | | | | |
| | | | | | | | | | | AGGGGTA | | | | |
| | | | | | | | | | | G | | | | |
| ETS1 | IL2RA Teffs | IL2RA low | 2113 | NM_005238.3 | NC_000011.10 | 1.28E+08 | sense | TGCATGG | 1802. | CATGTGCA | 1890. | TGG | 5 | 0.6503 |
| | | | | | | | | GGAGGAC | | TGGGGAG | | | | |
| | | | | | | | | CAGTCG | | GACCAGTC | | | | |
| | | | | | | | | | | GTGGTAG | | | | |
| RBPJ | IL2RA Teffs | IL2RA low | 3516 | NM_005349.3 | NC_000004.12 | 26415547 | sense | AAAGAAC | 1803. | AAAAAAA | 1891. | TGG | 5 | 0.6336 |
| | | | | | | | | AAATGGA | | GAACAAAT | | | | |
| | | | | | | | | ACGCGA | | GGAACGC | | | | |
| | | | | | | | | | | GATGGTTG | | | | |
| RBPJ | IL2RA Teffs | IL2RA low | 3516 | NM_005349.3 | NC_000004.12 | 26386378 | antisense | CACCTAGT | 1804. | TACTCACC | 1892. | TGG | 3 | 0.6435 |
| | | | | | | | | AAGTOGTT | | TAGTAAGT | | | | |
| | | | | | | | | TAGG | | CGTTTAGG | | | | |
| | | | | | | | | | | TGGAGG | | | | |
| RBPJ | IL2RA Teffs | IL2RA low | 3516 | NM_005349.3 | NC_000004.12 | 26424454 | sense | CATGCCAG | 1805. | TTTTCATG | 1893. | GGG | 7 | 0.6844 |
| | | | | | | | | TTCACAGC | | CCAGTTCA | | | | |
| | | | | | | | | AGTG | | CAGCAGT | | | | |
| | | | | | | | | | | GGGGAGC | | | | |
| RBPJ | IL2RA Teffs | IL2RA low | 3516 | NM_005349.3 | NC_000004.12 | 26424363 | sense | CATTGCCT | 1806. | TATGCATT | 1894. | TGG | 7 | 0.65 |
| | | | | | | | | CAGGAAC | | GCCTCAGG | | | | |
| | | | | | | | | AAAGG | | AACAAAG | | | | |
| | | | | | | | | | | GTGGCTC | | | | |
| RXRB | IL2RA Teffs | IL2RA low | 6257 | NM_021976.4 | NC_000006.12 | 33198326 | sense | ACGGCTAT | 1807. | GCAAACG | 1895. | GGG | 3 | 0.7124 |
| | | | | | | | | GTGCAATC | | GCTATGTG | | | | |
| | | | | | | | | TGCG | | CAATCTGC | | | | |
| | | | | | | | | | | GGGGACA | | | | |
| RXRB | IL2RA Teffs | IL2RA low | 6257 | NM_021976.4 | NC_000006.12 | 33200341 | sense | GCCCTGGC | 1808. | GACGGCC | 1896. | CGG | 1 | 0.6547 |
| | | | | | | | | TGGATCCC | | CTGGCTGG | | | | |
| | | | | | | | | GCAG | | ATCCCGCA | | | | |
| | | | | | | | | | | GCGGCGG | | | | |
| RXRB | IL2RA Teffs | IL2RA low | 6257 | NM_021976.4 | NC_000006.12 | 33197840 | sense | GGACAAC | 1809. | GCCGGGA | 1897. | TGG | 4 | 0.7879 |
| | | | | | | | | AAAGACT | | CAACAAA | | | | |
| | | | | | | | | GCACAG | | GACTGCAC | | | | |
| | | | | | | | | | | AGTGGAC | | | | |
| | | | | | | | | | | A | | | | |
| RXRB | IL2RA Teffs | IL2RA low | 6257 | NM_021976.4 | NC_000006.12 | 33198421 | antisense | GTGGCTTC | 1810. | ACTGGTG | 1898. | GGG | 3 | 0.6579 |
| | | | | | | | | ACATCTTC | | GCTTCACA | | | | |
| | | | | | | | | AGGG | | TCTTCAGG | | | | |
| | | | | | | | | | | GGGGCCA | | | | |
| ZNF148 | IL2RA Teffs | IL2RA low | 7707 | NM_021964.2 | NC_000003.12 | 1.25E+08 | sense | AGATCGA | 1811. | TTCAAGAT | 1899. | AGG | 4 | 0.5525 |
| | | | | | | | | AGTATGCC | | CGAAGTAT | | | | |
| | | | | | | | | TCACC | | GCCTCACC | | | | |
| | | | | | | | | | | AGGAGA | | | | |
| ZNF148 | IL2RA Teffs | IL2RA low | 7707 | NM_021964.2 | NC_000003.12 | 1.25E+08 | antisense | AGTGCATA | 1812. | ATTAAGTG | 1900. | AGG | 4 | 0.6259 |
| | | | | | | | | CTGTAGTC | | CATACTGT | | | | |
| | | | | | | | | CTTG | | AGTCCTTG | | | | |
| | | | | | | | | | | AGGAAG | | | | |
| ZNF148 | IL2RA Teffs | IL2RA low | 7707 | NM_021964.2 | NC_000003.12 | 1.25E+08 | antisense | GAGCCCCC | 1813. | ATGCGAG | 1901. | TGG | 9 | 0.6379 |
| | | | | | | | | AACTGACG | | CCCCCAAC | | | | |
| | | | | | | | | AATG | | TGACGAAT | | | | |
| | | | | | | | | | | GTGGCAT | | | | |
| ZNF148 | IL2RA Teffs | IL2RA low | 7707 | NM_021964.2 | NC_000003.12 | 1.25E+08 | antisense | TAATTAGT | 1814 | ATCATAAT | 1902. | AGG | 9 | 0.6151 |
| | | | | | | | | ACTACTAT | | TAGTACTA | | | | |
| | | | | | | | | GCAC | | CTATGCAC | | | | |
| | | | | | | | | | | AGGTTT | | | | |
| VPS52 | IL2RA Teffs | IL2RA low | 6293 | NM_001289174.1 | NC_000006.12 | 33267957 | sense | CAATGAAC | 1815. | TGGGCAAT | 1903. | AGG | 8 | 0.6103 |
| | | | | | | | | GAGCAAC | | GAACGAG | | | | |
| | | | | | | | | AGCAA | | CAACAGCA | | | | |
| | | | | | | | | | | AAGGAGA | | | | |
| VPS52 | IL2RA Teffs | IL2RA low | 6293 | NM_001289174.1 | NC_000006.12 | 33266562 | sense | CCGTACAC | 1816. | TGGGCCGT | 1904. | TGG | 11 | 0.6309 |
| | | | | | | | | TCAGCATG | | ACACTCAG | | | | |
| | | | | | | | | ACCC | | CATGACCC | | | | |
| | | | | | | | | | | TGGTAA | | | | |
| VPS52 | IL2RA Teffs | IL2RA low | 6293 | NM_001289174.1 | NC_000006.12 | 33269070 | sense | GAAATCGC | 1817. | CTTCGAAA | 1905. | GGG | 5 | 0.7039 |
| | | | | | | | | CAGGCAG | | TCGCCAGG | | | | |
| | | | | | | | | TTCGG | | CAGTTCGG | | | | |
| | | | | | | | | | | GGGAAA | | | | |
| VPS52 | IL2RA Teffs | IL2RA low | 6293 | NM_001289174.1 | NC_000006.12 | 33264461 | antisense | TCCAGGAT | 1818. | CATCTCCA | 1906. | TGG | 13 | 0.6852 |
| | | | | | | | | CAGTTCAA | | GGATCAGT | | | | |
| | | | | | | | | ACCG | | TCAAACCG | | | | |
| | | | | | | | | | | TGGCCA | | | | |
| TFAP4 | IL2RA Teffs | IL2RA low | 7023 | NM_003223.2 | NC_000016.10 | 4262329 | sense | ACAGCTCA | 1819. | ACACACAG | 1907. | AGG | 3 | 0.5694 |
| | | | | | | | | AGCGCTTC | | CTCAAGCG | | | | |
| | | | | | | | | ATCC | | CTTCATCC | | | | |
| | | | | | | | | | | AGGTGC | | | | |
| TFAP4 | IL2RA Teffs | IL2RA low | 7023 | NM_003223.2 | NC_000016.10 | 4261877 | sense | AGGCTCCC | 1820. | GCATAGG | 1908. | AGG | 4 | 0.6975 |
| | | | | | | | | CGGACATC | | CTCCCCGG | | | | |
| | | | | | | | | TGGG | | ACATCTGG | | | | |
| | | | | | | | | | | GAGGACG | | | | |
| TFAP4 | IL2RA Teffs | IL2RA low | 7023 | NM_003223.2 | NC_000016.10 | 4262671 | sense | CACTAACC | 1821. | ATTCCACT | 1909. | CGG | 2 | 0.6468 |
| | | | | | | | | CCCGAGAC | | AACCCCCG | | | | |
| | | | | | | | | TCAG | | AGACTCAG | | | | |
| | | | | | | | | | | CGGGAC | | | | |
| TFAP4 | IL2RA Teffs | IL2RA low | 7023 | NM_003223.2 | NC_000016.10 | 4262597 | sense | CGCATGCA | 1822. | GAGACGC | 1910 | GGG | 2 | 0.634 |
| | | | | | | | | GAGCATCA | | ATGCAGA | | | | |
| | | | | | | | | ACGC | | GCATCAAC | | | | |
| | | | | | | | | | | GCGGGAT | | | | |
| | | | | | | | | | | T | | | | |
| IKZF3 | IL2RA Teffs | IL2RA low | 22806 | NM_012481.4 | NC_000017.11 | 39792732 | sense | AAGATGA | 1823. | TGGAAAG | 1911. | TGG | 4 | 0.7182 |
| | | | | | | | | ACTGCGAT | | ATGAACTG | | | | |
| | | | | | | | | GTGTG | | CGATGTGT | | | | |
| | | | | | | | | | | GTGGATT | | | | |
| IKZF3 | IL2RA Teffs | IL2RA low | 22806 | NM_012481.4 | NC_000017.11 | 39788318 | sense | CAAGCAG | 1824 | GTTACAAG | 1912. | AGG | 6 | 0.6635 |
| | | | | | | | | AGAAGTTC | | CAGAGAA | | | | |
| | | | | | | | | CCTTG | | GTTCCCTT | | | | |
| | | | | | | | | | | GAGGAGC | | | | |
| IKZF3 | IL2RA Teffs | IL2RA low | 22806 | NM_012481.4 | NC_000017.11 | 39766413 | sense | GCTCATAC | 1825. | GTGAGCTC | 1913. | TGG | 8 | 0.6101 |
| | | | | | | | | AGACCCGC | | ATACAGAC | | | | |
| | | | | | | | | ATGA | | CCGCATGA | | | | |
| | | | | | | | | | | TGGACC | | | | |
| IKZF3 | IL2RA Teffs | IL2RA low | 22806 | NM_012481.4 | NC_000017.11 | 39777693 | sense | GGACAGA | 1826. | TACTGGAC | 1914. | TGG | 7 | 0.7336 |
| | | | | | | | | TTAGCAAG | | AGATTAGC | | | | |
| | | | | | | | | CAATG | | AAGCAAT | | | | |
| | | | | | | | | | | GTGGCAA | | | | |
| SRF | IL2RA Teffs | IL2RA low | 6722 | NM_003131.3 | NC_000006.12 | 43175724 | antisense | AGGTTGGT | 1827. | CGGCAGG | 1915. | CGG | 3 | 0.6646 |
| | | | | | | | | GACTGTGA | | TTGGTGAC | | | | |
| | | | | | | | | ACGC | | TGTGAACG | | | | |
| | | | | | | | | | | CCGGCTT | | | | |
| SRF | IL2RA Teffs | IL2RA low | 6722 | NM_003131.3 | NC_000006.12 | 43172119 | sense | AGTTCATC | 1828. | ATGGAGTT | 1916. | CGG | 1 | 0.7054 |
| | | | | | | | | GACAACA | | CATCGACA | | | | |
| | | | | | | | | AGCTG | | ACAAGCTG | | | | |
| | | | | | | | | | | CGGCGC | | | | |
| SRF | IL2RA Teffs | IL2RA low | 6722 | NM_003131.3 | NC_000006.12 | 43175844 | antisense | GGGCTGA | 1829. | ACTGGGG | 1917. | TGG | 3 | 0.65 |
| | | | | | | | | CACTAGCA | | CTGACACT | | | | |
| | | | | | | | | GACAC | | AGCAGAC | | | | |
| | | | | | | | | | | ACTGGTGC | | | | |
| SRF | IL2RA Teffs | IL2RA low | 6722 | NM_003131.3 | NC_000006.12 | 43174015 | antisense | TCTGTTGT | 1830. | CTGGTCTG | 1918. | GGG | 2 | 0.605 |
| | | | | | | | | GGGGTCT | | TTGTGGG | | | | |
| | | | | | | | | GAACG | | GTCTGAAC | | | | |
| | | | | | | | | | | GGGGTGG | | | | |
| CEBPZ | IL2RA Teffs | IL2RA low | 10153 | NM_005760.2 | NC_000002.12 | 37223251 | antisense | AAAGCTCC | 1831. | ATATAAAG | 1919. | TGG | 3 | 0.6404 |
| | | | | | | | | ACATATAA | | CTCCACAT | | | | |
| | | | | | | | | ATGG | | ATAAATGG | | | | |
| | | | | | | | | | | TGGCAT | | | | |
| CEBPZ | IL2RA Teffs | IL2RA low | 10153 | NM_005760.2 | NC_000002.12 | 37228088 | antisense | ACAAAGC | 1832. | TGTTACAA | 1920. | CGG | 2 | 0.63 |
| | | | | | | | | AGCTCATG | | AGCAGCTC | | | | |
| | | | | | | | | AGCCA | | ATGAGCCA | | | | |
| | | | | | | | | | | CGGTAA | | | | |
| CEBPZ | IL2RA Teffs | IL2RA low | 10153 | NM_005760.2 | NC_000002.12 | 37227623 | antisense | CAACATTA | 1833. | AAAGCAA | 1921. | TGG | 2 | 0.6374 |
| | | | | | | | | AAGCCTG | | CATTAAAG | | | | |
| | | | | | | | | GACAC | | CCTGGACA | | | | |
| | | | | | | | | | | CTGGTAT | | | | |
| CEBPZ | IL2RA Teffs | IL2RA low | 10153 | NM_005760.2 | NC_000002.12 | 37228473 | sense | TGAAGGC | 1834. | TGGATGA | 1922. | GGG | 2 | 0.7347 |
| | | | | | | | | AATTGTGT | | AGGCAATT | | | | |
| | | | | | | | | CATCG | | GTGTCATC | | | | |
| | | | | | | | | | | GGGGACA | | | | |
| BATF | IL2RA Teffs | IL2RA low | 10538 | NM_006399.3 | NC_000014.9 | 75546499 | sense | ACAGAAC | 1835. | AGAAACA | 1923. | AGG | 3 | 0.599 |
| | | | | | | | | GCGGCTCT | | GAACGCG | | | | |
| | | | | | | | | ACGCA | | GCTCTACG | | | | |
| | | | | | | | | | | CAAGGAG | | | | |
| | | | | | | | | | | A | | | | |
| BATF | IL2RA Teffs | IL2RA low | 10538 | NM_006399.3 | NC_000014.9 | 75522739 | antisense | AGGACTCT | 1836. | AAGGAGG | 1924. | GGG | 1 | 0.6137 |
| | | | | | | | | ACCTGTTT | | ACTCTACC | | | | |
| | | | | | | | | GCCA | | TGTTTGCC | | | | |
| | | | | | | | | | | AGGGGGA | | | | |
| BATF | IL2RA Teffs | IL2RA low | 10538 | NM_006399.3 | NC_000014.9 | 75525114 | sense | ATGTGAG | 1837. | GATGATGT | 1925. | AGG | 2 | 0.5377 |
| | | | | | | | | AAGAGTTC | | GAGAAGA | | | | |
| | | | | | | | | AGAGG | | GTTCAGAG | | | | |
| | | | | | | | | | | GAGGGAG | | | | |
| BATF | IL2RA Teffs | IL2RA low | 10538 | NM_006399.3 | NC_000014.9 | 75546520 | sense | GGAGATC | 1838. | GCAAGGA | 1926. | AGG | 3 | 0.7037 |
| | | | | | | | | AAGCAGCT | | GATCAAGC | | | | |
| | | | | | | | | CACAG | | AGCTCACA | | | | |
| | | | | | | | | | | GAGGAAC | | | | |
| CIC | IL2RA Teffs | IL2RA low | 23152 | NM_015125.4 | NC_000019.10 | 42291060 | sense | ACTGTCAC | 1839. | TGCCACTG | 1927. | GGG | 10 | 0.6591 |
| | | | | | | | | TAACCTAC | | TCACTAAC | | | | |
| | | | | | | | | TGGT | | CTACTGGT | | | | |
| | | | | | | | | | | GGGCAC | | | | |
| CIC | IL2RA Teffs | IL2RA low | 23152 | NM_015125.4 | NC_000019.10 | 42292311 | antisense | CCCGCCCG | 1840. | CGTGCCCG | 1928. | AGG | 13 | 0.6689 |
| | | | | | | | | CTGACTGC | | CCCGCTGA | | | | |
| | | | | | | | | ACAT | | CTGCACAT | | | | |
| | | | | | | | | | | AGGTGA | | | | |
| CIC | IL2RA Teffs | IL2RA low | 23152 | NM_015125.4 | NC_000019.10 | 42287372 | sense | CTCTACCG | 1841. | TTGCCTCT | 1929. | CGG | 4 | 0.6842 |
| | | | | | | | | CCCGGAA | | ACCGCCCG | | | | |
| | | | | | | | | AACGT | | GAAAACG | | | | |
| | | | | | | | | | | TCGGACC | | | | |
| CIC | IL2RA Teffs | IL2RA low | 23152 | NM_015125.4 | NC_000019.10 | 42289198 | antisense | TTGGGCCA | 1842. | GGCTTTGG | 1930. | GGG | 8 | 0.6248 |
| | | | | | | | | GAGTACG | | GCCAGAG | | | | |
| | | | | | | | | ATGCA | | TACGATGC | | | | |
| | | | | | | | | | | AGGGCCA | | | | |
| IKZF1 | IL2RA Teffs | IL2RA low | 10320 | NM_006060.5 | NC_000007.14 | 50376659 | sense | GAAAATG | 1843. | GAGAGAA | 1931. | GGG | 4 | 0.66 |
| | | | | | | | | AATGGCTC | | AATGAATG | | | | |
| | | | | | | | | CCACA | | GCTCCCAC | | | | |
| | | | | | | | | | | AGGGACC | | | | |
| IKZF1 | IL2RA Teffs | IL2RA low | 10320 | NM_006060.5 | NC_000007.14 | 50399996 | antisense | GATGGCTT | 1844 | TGTTGATG | 1932. | GGG | 8 | 0.7379 |
| | | | | | | | | GGTCCATC | | GCTTGGTC | | | | |
| | | | | | | | | ACGT | | CATCACGT | | | | |
| | | | | | | | | | | GGGACT | | | | |
| IKZF1 | IL2RA Teffs | IL2RA low | 10320 | NM_006060.5 | NC_000007.14 | 50382586 | sense | GGGGCCT | 1845. | GTGCGGG | 1933. | GGG | 5 | 0.6196 |
| | | | | | | | | CATTCACC | | GCCTCATT | | | | |
| | | | | | | | | CAGAA | | CACCCAGA | | | | |
| | | | | | | | | | | AGGGCAA | | | | |
| IKZF1 | IL2RA Teffs | IL2RA low | 10320 | NM_006060.5 | NC_000007.14 | 50327753 | sense | TCCAAGAG | 1846. | AAGCTCCA | 1934. | GGG | 3 | 0.617 |
| | | | | | | | | TGACAGA | | AGAGTGA | | | | |
| | | | | | | | | GTCGT | | CAGAGTC | | | | |
| | | | | | | | | | | GTGGGTA | | | | |
| | | | | | | | | | | A | | | | |
| IRF4 | IL2RA Teffs | IL2RA low | 3662 | NM_001195286.1 | NC_000006.12 | 394977 | sense | CAGACCCG | 1847. | ATCTCAGA | 1935. | AGG | 3 | 0.5822 |
| | | | | | | | | TACAAAGT | | CCCGTACA | | | | |
| | | | | | | | | GTAC | | AAGTGTAC | | | | |
| | | | | | | | | | | AGGATT | | | | |
| IRF4 | IL2RA Teffs | IL2RA low | 3662 | NM_001195286.1 | NC_000006.12 | 397215 | sense | CCCATGAC | 1848. | ATGTCCCA | 1936. | CGG | 5 | 0.7031 |
| | | | | | | | | GTTTGGAC | | TGACGTTT | | | | |
| | | | | | | | | CCCG | | GGACCCC | | | | |
| | | | | | | | | | | GCGGCCA | | | | |
| IRF4 | IL2RA Teffs | IL2RA low | 3662 | NM_001195286.1 | NC_000006.12 | 401466 | sense | CTACCGGG | 1849. | TGTACTAC | 1937. | AGG | 7 | 0.6428 |
| | | | | | | | | AAATCCTC | | CGGGAAA | | | | |
| | | | | | | | | GTGA | | TCCTCGTG | | | | |
| | | | | | | | | | | AAGGAGC | | | | |
| IRF4 | IL2RA Teffs | IL2RA low | 3662 | NM_001195286.1 | NC_000006.12 | 393251 | sense | CTGATCGA | 1850. | GTGGCTG | 1938. | CGG | 2 | 0.6887 |
| | | | | | | | | CCAGATCG | | ATCGACCA | | | | |
| | | | | | | | | ACAG | | GATCGACA | | | | |
| | | | | | | | | | | GCGGCAA | | | | |
| MBD2 | IL2RA Teffs | IL2RA low | 8932 | NM_003927.4 | NC_000018.10 | 54224170 | sense | AGCCGGTC | 1851. | CGGGAGC | 1939. | GGG | 1 | 0.5949 |
| | | | | | | | | CCTTTCCC | | CGGTCCCT | | | | |
| | | | | | | | | GTCG | | TTCCCGTC | | | | |
| | | | | | | | | | | GGGGAGC | | | | |
| MBD2 | IL2RA Teffs | IL2RA low | 8932 | NM_003927.4 | NC_000018.10 | 54205113 | sense | CCTCAGTT | 1852. | CAAGCCTC | 1940. | GGG | 2 | 0.5818 |
| | | | | | | | | GGCAAGG | | AGTTGGCA | | | | |
| | | | | | | | | TACCT | | AGGTACCT | | | | |
| | | | | | | | | | | GGGAAA | | | | |
| MBD2 | IL2RA Teffs | IL2RA low | 8932 | NM_003927.4 | NC_000018.10 | 54204999 | sense | CCTCTCAA | 1853. | CGATCCTC | 1941. | TGG | 2 | 0.5401 |
| | | | | | | | | TCAAAATA | | TCAATCAA | | | | |
| | | | | | | | | AGGT | | AATAAGGT | | | | |
| | | | | | | | | | | TGGTTA | | | | |
| MBD2 | IL2RA Teffs | IL2RA low | 8932 | NM_003927.4 | NC_000018.10 | 54224048 | sense | CGAAAATC | 1854. | GATCCGAA | 1942. | TGG | 1 | 0.494 |
| | | | | | | | | TGGGCTAA | | AATCTGGG | | | | |
| | | | | | | | | GTGC | | CTAAGTGC | | | | |
| | | | | | | | | | | TGGCAA | | | | |
| JAK3 | IL2RA Teffs | IL2RA low | 3718 | NM_000215.3 | NC_000019.10 | 17835098 | antisense | ACTCTCCA | 1855. | ACTTACTC | 1943. | CGG | 15 | 0.7301 |
| | | | | | | | | GGCTTAAC | | TCCAGGCT | | | | |
| | | | | | | | | ACAG | | TAACACAG | | | | |
| | | | | | | | | | | CGGGGC | | | | |
| JAK3 | IL2RA Teffs | IL2RA low | 3718 | NM_000215.3 | NC_000019.10 | 17839577 | antisense | AGCTCTCG | 1856. | CAGGAGC | 1944. | GGG | 10 | 0.7109 |
| | | | | | | | | AAGACTGC | | TCTCGAAG | | | | |
| | | | | | | | | TGTG | | ACTGCTGT | | | | |
| | | | | | | | | | | GGGGTCG | | | | |
| JAK3 | IL2RA Teffs | IL2RA low | 3718 | NM_000215.3 | NC_000019.10 | 17836043 | antisense | GTGTACAA | 1857. | CCAGGTGT | 1945. | TGG | 14 | 0.6764 |
| | | | | | | | | ATTCCTGC | | ACAAATTC | | | | |
| | | | | | | | | ACCA | | CTGCACCA | | | | |
| | | | | | | | | | | TGGTGC | | | | |
| JAK3 | IL2RA Teffs | IL2RA low | 3718 | NM_000215.3 | NC_000019.10 | 17842538 | sense | TGACGCG | 1858. | TTCGTGAC | 1946. | AGG | 6 | 0.6476 |
| | | | | | | | | GAGGCGT | | GCGGAGG | | | | |
| | | | | | | | | ATTCGG | | CGTATTCG | | | | |
| | | | | | | | | | | GAGGACG | | | | |
| BCL6 | IL2RA Teffs | IL2RA low | 604 | NM_001706.4 | NC_000003.12 | 1.88E+08 | sense | AAGTGATA | 1859. | CACGAAGT | 1947. | TGG | 5 | 0.8035 |
| | | | | | | | | TGCACTAC | | GATATGCA | | | | |
| | | | | | | | | AGTG | | CTACAGTG | | | | |
| | | | | | | | | | | TGGCTG | | | | |
| BCL6 | IL2RA Teffs | IL2RA low | 604 | NM_001706.4 | NC_000003.12 | 1.88E+08 | sense | CAAGACAT | 1860. | GCCCCAAG | 1948. | GGG | 5 | 0.6458 |
| | | | | | | | | CATGGCCT | | ACATCATG | | | | |
| | | | | | | | | ATCG | | GCCTATCG | | | | |
| | | | | | | | | | | GGGTCG | | | | |
| BCL6 | IL2RA Teffs | IL2RA low | 604 | NM_001706.4 | NC_000003.12 | 1.88E+08 | antisense | CATCTGCA | 1861. | GCTCCATC | 1949. | TGG | 4 | 0.6878 |
| | | | | | | | | GGTACATA | | TGCAGGTA | | | | |
| | | | | | | | | GCCG | | CATAGCCG | | | | |
| | | | | | | | | | | TGGCCA | | | | |
| BCL6 | IL2RA Teffs | IL2RA low | 604 | NM_001706.4 | NC_000003.12 | 1.88E+08 | antisense | TCCCTCAC | 1862. | CAGATCCC | 1950. | AGG | 3 | 0.6413 |
| | | | | | | | | CTGCAGGC | | TCACCTGC | | | | |
| | | | | | | | | CATG | | AGGCCAT | | | | |
| | | | | | | | | | | GAGGACC | | | | |
| ZNF236 | IL2RA Teffs | IL2RA low | 7776 | NM_007345.3 | NC_000018.10 | 76919836 | sense | ATCACGGA | 1863. | ATGCATCA | 1951. | AGG | 20 | 0.6507 |
| | | | | | | | | AGTCTCGT | | CGGAAGT | | | | |
| | | | | | | | | CCTG | | CTCGTCCT | | | | |
| | | | | | | | | | | GAGGTCA | | | | |
| ZNF236 | IL2RA Teffs | IL2RA low | 7776 | NM_007345.3 | NC_000018.10 | 76913812 | sense | GCATGTGC | 1864. | AGCAGCAT | 1952. | GGG | 18 | 0.7309 |
| | | | | | | | | GGTCGCAC | | GTGCGGTC | | | | |
| | | | | | | | | ACCG | | GCACACCG | | | | |
| | | | | | | | | | | GGGAAA | | | | |
| ZNF236 | IL2RA Teffs | IL2RA low | 7776 | NM_007345.3 | NC_000018.10 | 76905317 | sense | GGCAGCTT | 1865. | TGGTGGC | 1953. | GGG | 13 | 0.6112 |
| | | | | | | | | ACGGCGA | | AGCTTACG | | | | |
| | | | | | | | | CACAT | | GCGACAC | | | | |
| | | | | | | | | | | ATGGGTAT | | | | |
| ZNF236 | IL2RA Teffs | IL2RA low | 7776 | NM_007345.3 | NC_000018.10 | 76910097 | antisense | TGGTCTAC | 1866. | AAACTGGT | 1954. | AGG | 15 | 0.6536 |
| | | | | | | | | GTGCCCTC | | CTACGTGC | | | | |
| | | | | | | | | GCAG | | CCTCGCAG | | | | |
| | | | | | | | | | | AGGGTC | | | | |
| TCF3 | IL2RA Teffs | IL2RA low | 6929 | NM_003200.3 | NC_000019.10 | 1622055 | sense | CACCAGCA | 1867. | CCTGCACC | 1955. | AGG | 10 | 0.6193 |
| | | | | | | | | CGAGCGT | | AGCACGA | | | | |
| | | | | | | | | ATGGT | | GCGTATG | | | | |
| | | | | | | | | | | GTAGGAC | | | | |
| | | | | | | | | | | C | | | | |
| TCF3 | IL2RA Teffs | IL2RA low | 6929 | NM_003200.3 | NC_000019.10 | 1622322 | sense | CTATCCCG | 1868. | GCACCTAT | 1956. | TGG | 9 | 0.6605 |
| | | | | | | | | CCCCCTTC | | CCCGCCCC | | | | |
| | | | | | | | | TACG | | CTTCTACG | | | | |
| | | | | | | | | | | TGGCAG | | | | |
| TCF3 | IL2RA Teffs | IL2RA low | 6929 | NM_003200.3 | NC_000019.10 | 1619821 | antisense | GCTGGGC | 1869. | CGTAGCTG | 1957. | GGG | 14 | 0.6527 |
| | | | | | | | | GATAAGG | | GGCGATA | | | | |
| | | | | | | | | CACCGG | | AGGCACC | | | | |
| | | | | | | | | | | GGGGGCT | | | | |
| | | | | | | | | | | C | | | | |
| TCF3 | IL2RA Teffs | IL2RA low | 6929 | NM_003200.3 | NC_000019.10 | 1621034 | antisense | GTTATTGC | 1870. | AGAAGTTA | 1958. | GGG | 13 | 0.6808 |
| | | | | | | | | TTGAGTGA | | TTGCTTGA | | | | |
| | | | | | | | | TCCG | | GTGATCCG | | | | |
| | | | | | | | | | | GGGAGT | | | | |
| YY1 | IL2RA Teffs | IL2RA low | 7528 | NM_003403.4 | NC_000014.9 | 1E+08 | sense | AGATATTG | 1871. | AAAAAGA | 1959. | TGG | 2 | 0.667 |
| | | | | | | | | ACCATGAG | | TATTGACC | | | | |
| | | | | | | | | ACAG | | ATGAGAC | | | | |
| | | | | | | | | | | AGTGGTTG | | | | |
| YY1 | IL2RA Teffs | IL2RA low | 7528 | NM_003403.4 | NC_000014.9 | 1E+08 | sense | GGAGACC | 1872. | CGGTGGA | 1960. | TGG | 1 | 0.7975 |
| | | | | | | | | ATCGAGAC | | GACCATCG | | | | |
| | | | | | | | | CACAG | | AGACCACA | | | | |
| | | | | | | | | | | GTGGTGG | | | | |
| YY1 | IL2RA Teffs | IL2RA low | 7528 | NM_003403.4 | NC_000014.9 | 1E+08 | sense | GGTCACCG | 1873. | CGCTGGTC | 1961. | AGG | 1 | 0.6314 |
| | | | | | | | | ACGACCCG | | ACCGACG | | | | |
| | | | | | | | | ACCC | | ACCCGACC | | | | |
| | | | | | | | | | | CAGGTGC | | | | |
| YY1 | IL2RA Teffs | IL2RA low | 7528 | NM_003403.4 | NC_000014.9 | 1E+08 | sense | TGAACAAA | 1874. | ACATTGAA | 1962. | TGG | 1 | 0.7093 |
| | | | | | | | | CGCTGGTC | | CAAACGCT | | | | |
| | | | | | | | | ACCG | | GGTCACCG | | | | |
| | | | | | | | | | | TGGCGG | | | | |
| PURA | IL2RA Teffs | IL2RA low | 5813 | NM_005859.4 | NC_000005.10 | 1.4E+08 | sense | CCTTACTC | 1875. | GCCGCCTT | 1963. | TGG | 1 | 0.6294 |
| | | | | | | | | TCTCCATG | | ACTCTCTC | | | | |
| | | | | | | | | TCAG | | CATGTCAG | | | | |
| | | | | | | | | | | TGGCCG | | | | |
| PURA | IL2RA Teffs | IL2RA low | 5813 | NM_005859.4 | NC_000005.10 | 1.4E+08 | antisense | GAACTCGA | 1876. | CACGGAA | 1964. | CGG | 1 | 0.6814 |
| | | | | | | | | TGAGCCCC | | CTCGATGA | | | | |
| | | | | | | | | TGCG | | GCCCCTGC | | | | |
| | | | | | | | | | | GCGGGCA | | | | |
| PURA | IL2RA Teffs | IL2RA low | 5813 | NM_005859.4 | NC_000005.10 | 1.4E+08 | sense | GCTCATCG | 1877. | CCAAGCTC | 1965 | TGG | 1 | 0.6758 |
| | | | | | | | | ACGACTAC | | ATCGACGA | | | | |
| | | | | | | | | GGAG | | CTACGGA | | | | |
| | | | | | | | | | | GTGGAGG | | | | |
| PURA | IL2RA Teffs | IL2RA low | 5813 | NM_005859.4 | NC_000005.10 | 1.4E+08 | sense | TCCGCCAG | 1878. | CGCATCCG | 1966. | GGG | 1 | 0.6124 |
| | | | | | | | | ACGGTCAA | | CCAGACG | | | | |
| | | | | | | | | CCGG | | GTCAACCG | | | | |
| | | | | | | | | | | GGGGCCT | | | | |

TABLE 11
Nuclear factors that can be inhibited to increase IL2RA expression or overexpressed to decrease IL2RA expression
in regulatory T cells

| | | | | | | Position of | | sgRNA | | Target | | | |
|---|---|---|---|---|---|---|---|---|---|---|---|---|---|
| | | | Target | Target | Genomic | Base After | | Target | SEQ ID | Context | SEQ ID | PAM | Exon |
| gene_id | screen_target | screen_direction | Gene ID | Transcript | Sequence | Cut (1-based) | Strand | Sequence | NO: | Sequence | NO: | Sequence | Number |
| RAD21 | IL2RA Tregs | IL2RA | 5885 | NM_006265.2 | NC_000008.11 | 1.17E+08 | antisense | AAGTGTTGT | 1967. | GAACAAG | 1979. | TGG | 8 |
| | | high | | | | | | TTGATCAGT | | TGTTGTTT | | | |
| | | | | | | | | CA | | GATCAGT | | | |
| | | | | | | | | | | CATGGTT | | | |
| | | | | | | | | | | G | | | |
| RAD21 | IL2RA Tregs | IL2RA | 5885 | NM_006265.2 | NC_000008.11 | 1.17E+08 | antisense | ACATACTCT | 1968. | AGACACA | 1980. | TGG | 4 |
| | | high | | | | | | AAGTCAGGC | | TACTCTAA | | | |
| | | | | | | | | AG | | GTCAGGC | | | |
| | | | | | | | | | | AGTGGCT | | | |
| | | | | | | | | | | G | | | |
| RAD21 | IL2RA Tregs | IL2RA | 5885 | NM_006265.2 | NC_000008.11 | 1.17E+08 | sense | GTGTAATTT | 1969. | TCGAGTG | 1981. | TGG | 2 |
| | | high | | | | | | AGAGAGCA | | TAATTTA | | | |
| | | | | | | | | GCG | | GAGAGCA | | | |
| | | | | | | | | | | GCGTGGA | | | |
| | | | | | | | | | | GA | | | |
| RAD21 | IL2RA Tregs | IL2RA | 5885 | NM_006265.2 | NC_000008.11 | 1.17E+08 | antisense | TCTGTTCAG | 1970. | GTGCTCT | 1982. | AGG | 6 |
| | | high | | | | | | ACTCTAATA | | GTTCAGA | | | |
| | | | | | | | | GG | | CTCTAATA | | | |
| | | | | | | | | | | GGAGGTT | | | |
| | | | | | | | | | | A | | | |
| RNF20 | IL2RA Tregs | IL2RA | 56254 | NM_019592.6 | NC_000009.12 | 1.02E+08 | sense | ACTTCGGCA | 1971. | AGAAACT | 1983. | AGG | 9 |
| | | high | | | | | | AGACTTTGA | | TCGGCAA | | | |
| | | | | | | | | GG | | GACTTTG | | | |
| | | | | | | | | | | AGGAGGT | | | |
| | | | | | | | | | | CA | | | |
| RNF20 | IL2RA Tregs | IL2RA | 56254 | NM_019592.6 | NC_000009.12 | 1.02E+08 | sense | GCATCGCAC | 1972. | AAAAGCA | 1984. | AGG | 6 |
| | | high | | | | | | CATGTCTCA | | TCGCACC | | | |
| | | | | | | | | GG | | ATGTCTC | | | |
| | | | | | | | | | | AGGAGGT | | | |
| | | | | | | | | | | AC | | | |
| RNF20 | IL2RA Tregs | IL2RA | 56254 | NM_019592.6 | NC_000009.12 | 1.02E+08 | antisense | GGAGGGCA | 1973. | TGCAGGA | 1985. | AGG | 13 |
| | | high | | | | | | CTACCACTA | | GGGCACT | | | |
| | | | | | | | | CGC | | ACCACTA | | | |
| | | | | | | | | | | CGCAGGC | | | |
| | | | | | | | | | | GT | | | |
| RNF20 | IL2RA Tregs | IL2RA | 56254 | NM_019592.6 | NC_000009.12 | 1.02E+08 | antisense | TCGGTTGAC | 1974. | AGTATCG | 1986. | AGG | 3 |
| | | high | | | | | | AATCAATAG | | GTTGACA | | | |
| | | | | | | | | TG | | ATCAATA | | | |
| | | | | | | | | | | GTGAGGC | | | |
| | | | | | | | | | | AT | | | |
| ZNF626 | IL2RA Tregs | IL2RA | 199777 | NM_145297.3 | NC_000019.10 | 20646387 | sense | ACCATTGCA | 1975. | AGGGACC | 1987. | TGG | 2 |
| | | high | | | | | | ATTTAGAGA | | ATTGCAA | | | |
| | | | | | | | | TG | | TTTAGAG | | | |
| | | | | | | | | | | ATGTGGC | | | |
| | | | | | | | | | | CA | | | |
| ZNF626 | IL2RA Tregs | IL2RA | 199777 | NM_145297.3 | NC_000019.10 | 20645740 | sense | CTGATCACC | 1976. | AGACCTG | 1988. | AGG | 3 |
| | | high | | | | | | TGTCTGGAG | | ATCACCT | | | |
| | | | | | | | | CA | | GTCTGGA | | | |
| | | | | | | | | | | GCAAGGA | | | |
| | | | | | | | | | | AG | | | |
| ZNF626 | IL2RA Tregs | IL2RA | 199777 | NM_145297.3 | NC_000019.10 | 20646366 | sense | GGCCATAGA | 1977. | ATGTGGC | 1989. | AGG | 2 |
| | | high | | | | | | ATTCTCTCTG | | CATAGAA | | | |
| | | | | | | | | G | | TTCTCTCT | | | |
| | | | | | | | | | | GGAGGA | | | |
| | | | | | | | | | | GT | | | |
| ZNF626 | IL2RA Tregs | IL2RA | 199777 | NM_145297.3 | NC_000019.10 | 20646279 | sense | TAACCTGGT | 1978. | ACAGTAA | 1990. | AGG | 2 |
| | | high | | | | | | CTTCCTTGGT | | CCTGGTC | | | |
| | | | | | | | | G | | TTCCTTGG | | | |
| | | | | | | | | | | TGAGGAT | | | |
| | | | | | | | | | | A | | | |

TABLE 12
Nuclear factors that can be inhibited to decrease IL2RA expression or overexpressed to increase IL2RA expression
specifically in regulatory T cells

| | | | | | | Position of | | | | | | | |
|---|---|---|---|---|---|---|---|---|---|---|---|---|---|
| | | | | | | Base After | | sgRNA | SEQ | Target | SEQ | | |
| | | screen_ | Target | Target | Genomic | Cut (1- | | Target | ID | Context | ID | PAM | Exon |
| gene_id | screen_target | direction | Gene ID | Transcript | Sequence | based) | Strand | Sequence | NO: | Sequence | NO: | Sequence | Number |
| FOXP3 | IL2RA Tregs | IL2RA low | 50943 | NM_014009. | NC_000023. | 49257007 | sense | CCCACCCACA | 1991. | TGTCCCCACC | 2010. | TGG | 5 |
| | | | | 3 | 11 | | | GGGATCAAC | | CACAGGGATC | | | |
| | | | | | | | | G | | AACGTGGCCA | | | |
| FOXP3 | IL2RA Tregs | IL2RA low | 50943 | NM_014009. | NC_000023. | 49255795 | sense | CCTACTTAGG | 1992. | TCTCCCTACTT | 2011. | CGG | 7 |
| | | | | 3 | 11 | | | CACTGCCAGG | | AGGCACTGCC | | | |
| | | | | | | | | | | AGGCGGACC | | | |
| FOXP3 | IL2RA Tregs | IL2RA low | 50943 | NM_014009. | NC_000023. | 49257751 | antisense | GAGGGTGCC | 1993. | CCCGGAGGGT | 2012. | GGG | 3 |
| | | | | 3 | 11 | | | ACCATGACTA | | GCCACCATGA | | | |
| | | | | | | | | G | | CTAGGGGCA | | | |
| | | | | | | | | | | G | | | |
| TAF5L | IL2RA Tregs | IL2RA low | 27097 | NM_014409. | NC_000001. | 2.3E+08 | antisense | CGGGACACG | 1994. | GATGCGGGA | 2013. | GGG | 4 |
| | | | | 3 | 11 | | | TCTACTTGGT | | CACGTCTACT | | | |
| | | | | | | | | G | | TGGTGGGGCT | | | |
| | | | | | | | | | | C | | | |
| TAF5L | IL2RA Tregs | IL2RA low | 27097 | NM_014409. | NC_000001. | 2.3E+08 | sense | GCAGAACGA | 1995. | TTCTGCAGAA | 2014. | AGG | 4 |
| | | | | 3 | 11 | | | GGCTGCCCTA | | CGAGGCTGCC | | | |
| | | | | | | | | G | | CTAGAGGTCT | | | |
| TAF5L | IL2RA Tregs | IL2RA low | 27097 | NM_014409. | NC_000001. | 2.3E+08 | sense | GCGGACCAG | 1996. | CACTGCGGAC | 2015. | AGG | 5 |
| | | | | 3 | 11 | | | TGTACAGCAC | | CAGTGTACAG | | | |
| | | | | | | | | G | | CACGAGGTTC | | | |
| TAF5L | IL2RA Tregs | IL2RA low | 27097 | NM_014409. | NC_000001. | 2.3E+08 | antisense | TAAGGTGAG | 1997. | TATGTAAGGT | 2016. | GGG | 4 |
| | | | | 3 | 11 | | | GACTTTGCAC | | GAGGACTTTG | | | |
| | | | | | | | | A | | CACAGGGCA | | | |
| | | | | | | | | | | G | | | |
| USF2 | IL2RA Tregs | IL2RA low | 7392 | NM_003367. | NC_000019. | 35270541 | antisense | AGCCGTAGTA | 1998. | ACACAGCCGT | 2017. | TGG | 5 |
| | | | | 2 | 10 | | | TCTCCCACAC | | AGTATCTCCC | | | |
| | | | | | | | | | | ACACTGGACG | | | |
| USF2 | IL2RA Tregs | IL2RA low | 7392 | NM_003367. | NC_000019. | 35269463 | sense | CCACGACAAG | 1999 | GCAGCCACGA | 2018. | CGG | 2 |
| | | | | 2 | 10 | | | GGACCCGAG | | CAAGGGACCC | | | |
| | | | | | | | | G | | GAGGCGGAG | | | |
| | | | | | | | | | | G | | | |
| USF2 | IL2RA Tregs | IL2RA low | 7392 | NM_003367. | NC_000019. | 35270800 | antisense | CCTGCACATA | 2000. | GTCCCCTGCA | 2019. | GGG | 6 |
| | | | | 2 | 10 | | | CGGAGAGTA | | CATACGGAGA | | | |
| | | | | | | | | A | | GTAAGGGTGT | | | |
| USF2 | IL2RA Tregs | IL2RA low | 7392 | NM_003367. | NC_000019. | 35269690 | sense | TTCCGCACAG | 2001. | CCAGTTCCGC | 2020. | AGG | 3 |
| | | | | 2 | 10 | | | AGACAAATG | | ACAGAGACAA | | | |
| | | | | | | | | G | | ATGGAGGAC | | | |
| | | | | | | | | | | A | | | |
| GABPA | IL2RA Tregs | IL2RA low | 2551 | NM_001197297. | NC_000021 | 25741671 | sense | AAGCAGAGT | 2002. | GAGAAAGCA | 2021. | AGG | 2 |
| | | | | 1 | | | | GCACAGAAG | | GAGTGCACAG | | | |
| | | | | | | | | AA | | AAGAAAGGTT | | | |
| | | | | | | | | | | G | | | |
| GABPA | IL2RA Tregs | IL2RA low | 2551 | NM_001197297. | NC_000021. | 25758095 | antisense | CCGAAATGTT | 2003. | CTCCCCGAAA | 2022. | AGG | 6 |
| | | | | 1 | 9 | | | GAGTGTGGT | | TGTTGAGTGT | | | |
| | | | | | | | | G | | GGTGAGGTCT | | | |
| GABPA | IL2RA Tregs | IL2RA low | 2551 | NM_001197297. | NC_000021. | 25758165 | antisense | CTCCAGAGAA | 2004. | ATGACTCCAG | 2023. | AGG | 6 |
| | | | | 1 | 9 | | | TTTCTCCCCG | | AGAATTTCTC | | | |
| | | | | | | | | | | CCCGAGGAAC | | | |
| GABPA | IL2RA Tregs | IL2RA low | 2551 | NM_001197297. | NC_000021. | 25758018 | sense | TCTTTCTAGA | 2005. | TTTTTCTTTCT | 2024. | TGG | 6 |
| | | | | 1 | 9 | | | TCCCATACAG | | AGATOCCATA | | | |
| | | | | | | | | | | CAGTGGTCC | | | |
| MED30 | IL2RA Tregs | IL2RA low | 90390 | NM_080651. | NC_000008. | 1.18E+08 | sense | ACACTGGAAC | 2006. | TACCACACTG | 2025. | CGG | 2 |
| | | | | 3 | 11 | | | ATATCAAGAC | | GAACATATCA | | | |
| | | | | | | | | | | AGACCGGTTA | | | |
| MED30 | IL2RA Tregs | IL2RA low | 90390 | NM_080651. | NC_000008. | 1.18E+08 | sense | GACAAATGCA | 2007. | ATATGACAAA | 2026. | TGG | 2 |
| | | | | 3 | 11 | | | ATGAAAACTG | | TGCAATGAAA | | | |
| | | | | | | | | | | ACTGTGGTGG | | | |
| MED30 | IL2RA Tregs | IL2RA low | 90390 | NM_080651. | NC_000008. | 1.18E+08 | sense | GGACATCGT | 2008. | TGCAGGACAT | 2027. | TGG | 1 |
| | | | | 3 | 11 | | | GTACCGCACC | | CGTGTACCGC | | | |
| | | | | | | | | A | | ACCATGGAGA | | | |
| MED30 | IL2RA Tregs | IL2RA low | 90390 | NM_080651. | NC_000008. | 1.18E+08 | sense | GGCCGCCCG | 2009. | AGCAGGCCGC | 2028. | CGG | 1 |
| | | | | 3 | 11 | | | GGAAGTCAA | | CCGGGAAGTC | | | |
| | | | | | | | | CA | | AACACGGCGT | | | |

TABLE 13
Nuclear factors that can be inhibited to increase IL2RA expression or overexpressed to decrease IL2RA expression in
effector T cells and regulatory T cells

| | | | | | | Position | | | | | | | | |
|---|---|---|---|---|---|---|---|---|---|---|---|---|---|---|
| | | | | | | of Base | | sgRNA | SEQ | Target | SEQ | | | |
| | screen_ | screen_ | Target | Target | Genomic | After Cut | | Target | ID | Context | ID | PAM | Exon | Rule Set 2 |
| gene_id | target | direction | Gene ID | Transcript | Sequence | (1-based) | Strand | Sequence | NO: | Sequence | NO: | Sequence | Number | score |
| HNRNPK | IL2RA | IL2RA | 3190 | NM_ | NC_ | 83972098 | sense | ATGATGT | 2029. | TACAATG | 2157. | CGG | 11 | 0.7754 |
| | Tregs | high | | 002140.3 | 000009.12 | | | TTGATGA | | ATGTTTG | | | | |
| | | | | | | | | CCGTCG | | ATGACCG | | | | |
| | | | | | | | | | | TCGCGGA | | | | |
| | | | | | | | | | | CG | | | | |
| HNRNPK | IL2RA | IL2RA | 3190 | NM_ | NC_ | 83975465 | antisense | CTGTTGG | 2030. | TAAACTG | 2158. | GGG | 6 | 0.6273 |
| | Tregs | high | | 002140.3 | 000009.12 | | | GACATAC | | TTGGGAC | | | | |
| | | | | | | | | CGCTCG | | ATACCGC | | | | |
| | | | | | | | | | | TCGGGG | | | | |
| | | | | | | | | | | CCA | | | | |
| HNRNPK | IL2RA | IL2RA | 3190 | NM_ | NC_ | 83971978 | sense | GATGATA | 2031. | TTATGAT | 2159. | AGG | 11 | 0.7149 |
| | Tregs | high | | 002140.3 | 000009.12 | | | TGAGCCC | | GATATGA | | | | |
| | | | | | | | | TCGTCG | | GCCCTCG | | | | |
| | | | | | | | | | | TCGAGG | | | | |
| | | | | | | | | | | ACC | | | | |
| HNRNPK | IL2RA | IL2RA | 3190 | NM_ | NC_ | 83973291 | sense | TAAAATC | 2032. | GTGCTAA | 2160. | AGG | 9 | 0.6608 |
| | Tregs | high | | 002140.3 | 000009.12 | | | AAAGAA | | AATCAAA | | | | |
| | | | | | | | | CTTCGAG | | GAACTTC | | | | |
| | | | | | | | | | | GAGAGG | | | | |
| | | | | | | | | | | TAA | | | | |
| KLF13 | IL2RA | IL2RA | 51621 | NM_ | NC_ | 31327702 | sense | CCGACCT | 2033. | CGCGCCG | 2161. | AGG | 1 | 0.7221 |
| | Tregs | high | | 015995.3 | 000015.10 | | | CGAGTCC | | ACCTCGA | | | | |
| | | | | | | | | CCGCAG | | GTCCCCG | | | | |
| | | | | | | | | | | CAGAGG | | | | |
| | | | | | | | | | | AAG | | | | |
| KLF13 | IL2RA | IL2RA | 51621 | NM_ | NC_ | 31327415 | sense | CGTGGTG | 2034. | TCTTOGT | 2162. | CGG | 1 | 0.6798 |
| | Tregs | high | | 015995.3 | 000015.10 | | | GCGCGG | | GGTGGC | | | | |
| | | | | | | | | ATCCTAG | | GCGGATC | | | | |
| | | | | | | | | | | CTAGCGG | | | | |
| | | | | | | | | | | ACC | | | | |
| KLF13 | IL2RA | IL2RA | 51621 | NM_ | NC_ | 31327274 | sense | CGTGTCC | 2035. | GCCTCGT | 2163. | CGG | 1 | 0.7 |
| | Tregs | high | | 015995.3 | 000015.10 | | | ATGTCGA | | GTCCATG | | | | |
| | | | | | | | | GCCGCG | | TCGAGCC | | | | |
| | | | | | | | | | | GCGCGG | | | | |
| | | | | | | | | | | TCG | | | | |
| KLF13 | IL2RA | IL2RA | 51621 | NM_ | NC_ | 31327767 | antisense | GAGTTCT | 2036. | GTGTGA | 2164. | AGG | 1 | 0.592 |
| | Tregs | high | | 015995.3 | 000015.10 | | | CAGGTGC | | GTTCTCA | | | | |
| | | | | | | | | GCCTTG | | GGTGCG | | | | |
| | | | | | | | | | | CCTTGAG | | | | |
| | | | | | | | | | | GTGC | | | | |
| TFDP1 | IL2RA | IL2RA | 7027 | NM_ | NC_ | 1.14E+08 | sense | ACCGGCA | 2037. | AGAGAC | 2165. | TGG | 5 | 0.6315 |
| | Tregs | high | | 007111.4 | 000013.11 | | | GCGTCAA | | CGGCAG | | | | |
| | | | | | | | | ACACCC | | CGTCAAA | | | | |
| | | | | | | | | | | CACCCTG | | | | |
| | | | | | | | | | | GTGG | | | | |
| TFDP1 | IL2RA | IL2RA | 7027 | NM_ | NC_ | 1.14E+08 | sense | ATGACCA | 2038. | GCTTATG | 2166. | CGG | 7 | 0.6204 |
| | Tregs | high | | 007111.4 | 000013.11 | | | GAAAAA | | ACCAGAA | | | | |
| | | | | | | | | CATAAGA | | AAACATA | | | | |
| | | | | | | | | | | AGACGG | | | | |
| | | | | | | | | | | CGC | | | | |
| TFDP1 | IL2RA | IL2RA | 7027 | NM_ | NC_ | 1.14E+08 | antisense | CCTTCAT | 2039. | CAGACCT | 2167. | AGG | 6 | 0.6851 |
| | Tregs | high | | 007111.4 | 000013.11 | | | GGAGAA | | TCATGGA | | | | |
| | | | | | | | | ATGCCGT | | GAAATGC | | | | |
| | | | | | | | | | | CGTAGGC | | | | |
| | | | | | | | | | | CC | | | | |
| TFDP1 | IL2RA | IL2RA | 7027 | NM_ | NC_ | 1.14E+08 | sense | GGTGCA | 2040. | ACCTGGT | 2168. | CGG | 9 | 0.6402 |
| | Tregs | high | | 007111.4 | 000013.11 | | | GAGAAA | | GCAGAG | | | | |
| | | | | | | | | CCGGCAT | | AAACCG | | | | |
| | | | | | | | | G | | GCATGCG | | | | |
| | | | | | | | | | | GAGC | | | | |
| NFKB2 | IL2RA | IL2RA | 4791 | NM_ | NC_ | 1.02E+08 | sense | ACTCGAC | 2041. | CCCTACT | 2169. | CGG | 14 | 0.7089 |
| | Tregs | high | | 001077494.3 | 000010.11 | | | TACGGCG | | CGACTAC | | | | |
| | | | | | | | | TCACCG | | GGCGTCA | | | | |
| | | | | | | | | | | CCGCGG | | | | |
| | | | | | | | | | | ACG | | | | |
| NFKB2 | IL2RA | IL2RA | 4791 | NM_ | NC_ | 1.02E+08 | sense | CCCACTC | 2042. | ATATCCC | 2170. | GGG | 9 | 0.6913 |
| | Tregs | high | | 001077494.3 | 000010.11 | | | CATAGAA | | ACTCCAT | | | | |
| | | | | | | | | TCTCCG | | AGAATCT | | | | |
| | | | | | | | | | | CCGGGG | | | | |
| | | | | | | | | | | GCA | | | | |
| NFKB2 | IL2RA | IL2RA | 4791 | NM_ | NC_ | 1.02E+08 | sense | CTGCAAC | 2043. | GTTTCTG | 2171. | AGG | 11 | 0.6401 |
| | Tregs | high | | 001077494.3 | 000010.11 | | | TGAAACG | | CAACTGA | | | | |
| | | | | | | | | CAAGCG | | AACGCAA | | | | |
| | | | | | | | | | | GCGAGG | | | | |
| | | | | | | | | | | AGG | | | | |
| NFKB2 | IL2RA | IL2RA | 4791 | NM_ | NC_ | 1.02E+08 | sense | GGGACC | 2044. | ACGAGG | 2172. | TGG | 6 | 0.7003 |
| | Tregs | high | | 001077494.3 | 000010.11 | | | AGCCAA | | GACCAGC | | | | |
| | | | | | | | | GATCGA | | CAAGATC | | | | |
| | | | | | | | | GG | | GAGGTG | | | | |
| | | | | | | | | | | GACC | | | | |
| FOXK1 | IL2RA | IL2RA | 221937 | NM_ | NC_ | 4757132 | sense | AACAGG | 2045. | GTGGAA | 2173. | AGG | 5 | 0.6681 |
| | Tregs | high | | 001037165.1 | 000007.14 | | | CATTCCG | | CAGGCAT | | | | |
| | | | | | | | | GAAACG | | TCCGGAA | | | | |
| | | | | | | | | G | | ACGGAG | | | | |
| | | | | | | | | | | GCAG | | | | |
| FOXK1 | IL2RA | IL2RA | 221937 | NM_ | NC_ | 4754516 | antisense | AGGTCAC | 2046. | TCCGAGG | 2174. | CGG | 3 | 0.734 |
| | Tregs | high | | 001037165.1 | 000007.14 | | | GTTCTGC | | TCACGTT | | | | |
| | | | | | | | | ACAAAG | | CTGCACA | | | | |
| | | | | | | | | | | AAGCGG | | | | |
| | | | | | | | | | | TAA | | | | |
| FOXK1 | IL2RA | IL2RA | 221937 | NM_ | NC_ | 4759162 | antisense | CTAACTT | 2047. | GAAGCTA | 2175. | GGG | 6 | 0.6672 |
| | Tregs | high | | 001037165.1 | 000007.14 | | | GGACCCA | | ACTTGGA | | | | |
| | | | | | | | | AACTCA | | CCCAAAC | | | | |
| | | | | | | | | | | TCAGGGT | | | | |
| | | | | | | | | | | CG | | | | |
| FOXK1 | IL2RA | IL2RA | 221937 | NM_ | NC_ | 4755361 | sense | GCATTAC | 2048. | CCAAGCA | 2176. | CGG | 4 | 0.7131 |
| | Tregs | high | | 001037165.1 | 000007.14 | | | CCCTACT | | TTACCCC | | | | |
| | | | | | | | | ACCGGA | | TACTACC | | | | |
| | | | | | | | | | | GGACGG | | | | |
| | | | | | | | | | | CCG | | | | |
| MYB | IL2RA | IL2RA | 4602 | NM_ | NC_ | 1.35E+08 | sense | ACCAGGC | 2049. | ATTTACC | 2177. | GGG | 5 | 0.6859 |
| | Tregs | high | | 005375.2 | 000006.12 | | | ACACAAG | | AGGCAC | | | | |
| | | | | | | | | AGACTG | | ACAAGA | | | | |
| | | | | | | | | | | GACTGG | | | | |
| | | | | | | | | | | GGAAC | | | | |
| MYB | IL2RA | IL2RA | 4602 | NM_ | NC_ | 1.35E+08 | sense | AGAAATA | 2050. | GTACAGA | 2178. | TGG | 5 | 0.6009 |
| | Tregs | high | | 005375.2 | 000006.12 | | | CGGTCCG | | AATACGG | | | | |
| | | | | | | | | AAACGT | | TCCGAAA | | | | |
| | | | | | | | | | | CGTTGGT | | | | |
| | | | | | | | | | | CT | | | | |
| MYB | IL2RA | IL2RA | 4602 | NM_ | NC_ | 1.35E+08 | sense | AGTCTGG | 2051. | CCCAAGT | 2179. | GGG | 2 | 0.7063 |
| | Tregs | high | | 005375.2 | 000006.12 | | | AAAGCGT | | CTGGAAA | | | | |
| | | | | | | | | CACTTG | | GCGTCAC | | | | |
| | | | | | | | | | | TTGGGG | | | | |
| | | | | | | | | | | AAA | | | | |
| MYB | IL2RA | IL2RA | 4602 | NM_ | NC_ | 1.35E+08 | antisense | TATTTAC | 2052. | ACTATAT | 2180. | GGG | 7 | 0.6157 |
| | Tregs | high | | 005375.2 | 000006.12 | | | ATGTAAC | | TTACATG | | | | |
| | | | | | | | | GCTACA | | TAACGCT | | | | |
| | | | | | | | | | | ACAGGG | | | | |
| | | | | | | | | | | TAT | | | | |
| ZNF217 | IL2RA | IL2RA | 7764 | NM_ | NC_ | 53581993 | sense | CAAAATC | 2053. | AGACCAA | 2181. | GGG | 1 | 0.6608 |
| | Tregs | high | | 006526.2 | 000020.11 | | | TCACCCT | | AATCTCA | | | | |
| | | | | | | | | GAAACG | | CCCTGAA | | | | |
| | | | | | | | | | | ACGGGG | | | | |
| | | | | | | | | | | AAG | | | | |
| ZNF217 | IL2RA | IL2RA | 7764 | NM_ | NC_ | 53581749 | sense | CCACGGC | 2054. | ACTCCCA | 2182. | TGG | 1 | 0.6177 |
| | Tregs | high | | 006526.2 | 000020.11 | | | GAAGCG | | CGGCGA | | | | |
| | | | | | | | | CCCTCCG | | AGCGCCC | | | | |
| | | | | | | | | | | TCCGTGG | | | | |
| | | | | | | | | | | ACG | | | | |
| ZNF217 | IL2RA | IL2RA | 7764 | NM_ | NC_ | 53582284 | sense | GGACAC | 2055. | ATGCGG | 2183. | GGG | 1 | 0.7154 |
| | Tregs | high | | 006526.2 | 000020.11 | | | ATAATGG | | ACACATA | | | | |
| | | | | | | | | CAAATCG | | ATGGCAA | | | | |
| | | | | | | | | | | ATCGGG | | | | |
| | | | | | | | | | | GGCC | | | | |
| ZNF217 | IL2RA | IL2RA | 7764 | NM_ | NC_ | 53576811 | antisense | TGGGTG | 2056. | GTTATGG | 2184. | AGG | 3 | 0.6707 |
| | Tregs | high | | 006526.2 | 000020.11 | | | GTACTGC | | GTGGTAC | | | | |
| | | | | | | | | CATCCGG | | TGCCATC | | | | |
| | | | | | | | | | | CGGAGG | | | | |
| | | | | | | | | | | AGG | | | | |
| CBFB | IL2RA | IL2RA | 865 | NM_ | NC_ | 67036720 | antisense | AAGTCGA | 2057. | TTCTAAG | 2185. | AGG | 3 | 0.5993 |
| | Tregs | high | | 001755.2 | 000016.10 | | | CATACTC | | TCGACAT | | | | |
| | | | | | | | | TCGGCT | | ACTCTCG | | | | |
| | | | | | | | | | | GCTAGGT | | | | |
| | | | | | | | | | | GT | | | | |
| CBFB | IL2RA | IL2RA | 865 | NM_ | NC_ | 67029479 | antisense | CCTGCCT | 2058. | CCCGCCT | 2186 | CGG | 1 | 0.6743 |
| | Tregs | high | | 001755.2 | 000016.10 | | | CACCTCA | | GCCTCAC | | | | |
| | | | | | | | | CACTCG | | CTCACAC | | | | |
| | | | | | | | | | | TCGCGGC | | | | |
| | | | | | | | | | | TC | | | | |
| CBFB | IL2RA | IL2RA | 865 | NM_ | NC_ | 67029807 | antisense | GCCGACT | 2059. | GCCAGCC | 2187. | CGG | 2 | 0.7383 |
| | Tregs | high | | 001755.2 | 000016.10 | | | TACGATT | | GACTTAC | | | | |
| | | | | | | | | TCCGAG | | GATTTCC | | | | |
| | | | | | | | | | | GAGCGG | | | | |
| | | | | | | | | | | CCG | | | | |
| CBFB | IL2RA | IL2RA | 865 | NM_ | NC_ | 67066729 | sense | GGAGTCT | 2060. | GAATGG | 2188. | AGG | 4 | 0.5938 |
| | Tregs | high | | 001755.2 | 000016.10 | | | GTGTTAT | | AGTCTGT | | | | |
| | | | | | | | | CTGGAA | | GTTATCT | | | | |
| | | | | | | | | | | GGAAAG | | | | |
| | | | | | | | | | | GCTG | | | | |
| KLF2 | IL2RA | IL2RA | 10365 | NM_ | NC_ | 16325729 | antisense | AAACCAG | 2061. | GCCGAA | 2189. | CGG | 2 | 0.5997 |
| | Tregs | high | | 016270.2 | 000019.10 | | | GGCCACC | | ACCAGG | | | | |
| | | | | | | | | GAAAGG | | GCCACCG | | | | |
| | | | | | | | | | | AAAGGC | | | | |
| | | | | | | | | | | GGCGG | | | | |
| KLF2 | IL2RA | IL2RA | 10365 | NM_ | NC_ | 16325576 | antisense | CCCTCGC | 2062. | GGCGCCC | 2190. | CGG | 2 | 0.5868 |
| | Tregs | high | | 016270.2 | 000019.10 | | | GCTTGAG | | TCGCGCT | | | | |
| | | | | | | | | GCCGCG | | TGAGGCC | | | | |
| | | | | | | | | | | GCGCGG | | | | |
| | | | | | | | | | | TCC | | | | |
| KLF2 | IL2RA | IL2RA | 10365 | NM_ | NC_ | 16325811 | sense | CTTCGGT | 2063. | CAGCCTT | 2191. | CGG | 2 | 0.7252 |
| | Tregs | high | | 016270.2 | 000019.10 | | | CTCTTCG | | CGGTCTC | | | | |
| | | | | | | | | ACGACG | | TTCGACG | | | | |
| | | | | | | | | | | ACGCGG | | | | |
| | | | | | | | | | | CCG | | | | |
| KLF2 | IL2RA | IL2RA | 10365 | NM_ | NC_ | 16325354 | antisense | TCGGGGT | 2064. | GGGTTCG | 2192. | CGG | 2 | 0.6967 |
| | Tregs | high | | 016270.2 | 000019.10 | | | AATAGAA | | GGGTAAT | | | | |
| | | | | | | | | CGCAGG | | AGAACG | | | | |
| | | | | | | | | | | CAGGCG | | | | |
| | | | | | | | | | | GCGG | | | | |
| CTCF | IL2RA | IL2RA | 10664 | NM_ | NC_ | 67612001 | antisense | CGATCCA | 2065. | GTGACG | 2193. | TGG | 4 | 0.6364 |
| | Teffs | high | | 006565.3 | 000016.10 | | | AATTTGA | | ATCCAAA | | | | |
| | | | | | | | | ACGCCG | | TTTGAAC | | | | |
| | | | | | | | | | | GCCGTG | | | | |
| | | | | | | | | | | GACA | | | | |
| CTCF | IL2RA | IL2RA | 10664 | NM_ | NC_ | 67611476 | sense | GAGCAA | 2066. | AAAAGA | 2194. | AGG | 3 | 0.6793 |
| | Teffs | high | | 006565.3 | 000016.10 | | | ACTGCGT | | GCAAACT | | | | |
| | | | | | | | | TATACAG | | GOGTTAT | | | | |
| | | | | | | | | | | ACAGAG | | | | |
| | | | | | | | | | | GAGG | | | | |
| CTCF | IL2RA | IL2RA | 10664 | NM_ | NC_ | 67610967 | sense | TTACCCC | 2067. | CCACTTA | 2195. | TGG | 3 | 0.6378 |
| | Teffs | high | | 006565.3 | 000016.10 | | | AGAACCA | | CCCCAGA | | | | |
| | | | | | | | | GACGGA | | ACCAGAC | | | | |
| | | | | | | | | | | GGATGG | | | | |
| | | | | | | | | | | GGG | | | | |
| CTCF | IL2RA | IL2RA | 10664 | NM_ | NC_ | 67620773 | sense | TTTGTGC | 2068. | GCAGTTT | 2196. | GGG | 6 | 0.6444 |
| | Teffs | high | | 006565.3 | 000016.10 | | | AGTTATG | | GTGCAGT | | | | |
| | | | | | | | | CCAGCA | | TATGCCA | | | | |
| | | | | | | | | | | GCAGGG | | | | |
| | | | | | | | | | | ACA | | | | |
| PTPRC | IL2RA | IL2RA | 5788 | NM_ | NC_ | 1.99E+08 | antisense | AGCATTA | 2069. | CACTAGC | 2197. | GGG | 4 | 0.6692 |
| | Teffs | high | | 002838.4 | 000001.11 | | | TCCAAAG | | ATTATCC | | | | |
| | | | | | | | | AGTCCG | | AAAGAG | | | | |
| | | | | | | | | | | TCCGGG | | | | |
| | | | | | | | | | | GATA | | | | |
| PTPRC | IL2RA | IL2RA | 5788 | NM_ | NC_ | 1.99E+08 | antisense | GGAAACT | 2070. | TATAGGA | 2198. | CGG | 19 | 0.6482 |
| | Teffs | high | | 002838.4 | 000001.11 | | | TGCTGAA | | AACTTGC | | | | |
| | | | | | | | | CACCCG | | TGAACAC | | | | |
| | | | | | | | | | | CCGCGG | | | | |
| | | | | | | | | | | GAT | | | | |
| PTPRC | IL2RA | IL2RA | 5788 | NM_ | NC_ | 1.99E+08 | antisense | TCCAAAT | 2071. | AACTTCC | 2199. | GGG | 14 | 0.6167 |
| | Teffs | high | | 002838.4 | 000001.11 | | | GGTAAC | | AAATGGT | | | | |
| | | | | | | | | GTTCATG | | AACGTTC | | | | |
| | | | | | | | | | | ATGGGG | | | | |
| | | | | | | | | | | GCC | | | | |
| PTPRC | IL2RA | IL2RA | 5788 | NM_ | NC_ | 1.99E+08 | sense | TGTGGAT | 2072 | TCACTGT | 2200. | AGG | 9 | 0.6937 |
| | Teffs | high | | 002838.4 | 000001.11 | | | TACTTAT | | GGATTAC | | | | |
| | | | | | | | | ATAACA | | TTATATA | | | | |
| | | | | | | | | | | ACAAGG | | | | |
| | | | | | | | | | | AAA | | | | |
| NR2C2 | IL2RA | IL2RA | 7182 | NM_ | NC_ | 15030406 | sense | CCAGTCG | 2073. | GAGACC | 2201. | AGG | 10 | 0.6976 |
| | Teffs | high | | 003298.4 | 000003.12 | | | ACACCCA | | AGTCGAC | | | | |
| | | | | | | | | TCATTG | | ACCCATC | | | | |
| | | | | | | | | | | ATTGAGG | | | | |
| | | | | | | | | | | TTG | | | | |
| NR2C2 | IL2RA | IL2RA | 7182 | NM_ | NC_ | 15016174 | antisense | CCCCAGT | 2074. | TCTTCCC | 2202. | AGG | 5 | 0.7308 |
| | Teffs | high | | 003298.4 | 000003.12 | | | AAACGCT | | CAGTAAA | | | | |
| | | | | | | | | CCACAG | | CGCTCCA | | | | |
| | | | | | | | | | | CAGAGG | | | | |
| | | | | | | | | | | CAG | | | | |
| NR2C2 | IL2RA | IL2RA | 7182 | NM_ | NC_ | 15024201 | antisense | GAACGTC | 2075. | TAGAGA | 2203. | TGG | 8 | 0.6168 |
| | Teffs | high | | 003298.4 | 000003.12 | | | ACCTTAG | | ACGTCAC | | | | |
| | | | | | | | | AATCCG | | CTTAGAA | | | | |
| | | | | | | | | | | TCCGTGG | | | | |
| | | | | | | | | | | CCA | | | | |
| NR2C2 | IL2RA | IL2RA | 7182 | NM_ | NC_ | 15023322 | antisense | TCTTTGT | 2076. | TCCATCT | 2204. | GGG | 7 | 0.6618 |
| | Teffs | high | | 003298.4 | 000003.12 | | | CTGCCAC | | TTGTCTG | | | | |
| | | | | | | | | AAACGT | | CCACAAA | | | | |
| | | | | | | | | | | CGTGGG | | | | |
| | | | | | | | | | | AGT | | | | |
| TP53 | IL2RA | IL2RA | 7157 | NM_ | NC_ | 7676227 | antisense | CCATTGT | 2077. | TGAACCA | 2205. | GGG | 4 | 0.6899 |
| | Teffs | high | | 000546.5 | 000017.11 | | | TCAATAT | | TTGTTCA | | | | |
| | | | | | | | | CGTCCG | | ATATCGT | | | | |
| | | | | | | | | | | CCGGGG | | | | |
| | | | | | | | | | | ACA | | | | |
| TP53 | IL2RA | IL2RA | 7157 | NM_ | NC_ | 7675058 | sense | GAGCGCT | 2078. | CCATGAG | 2206. | TGG | 5 | 0.6542 |
| | Teffs | high | | 000546.5 | 000017.11 | | | GCTCAGA | | CGCTGCT | | | | |
| | | | | | | | | TAGCGA | | CAGATAG | | | | |
| | | | | | | | | | | CGATGGT | | | | |
| | | | | | | | | | | GA | | | | |
| TP53 | IL2RA | IL2RA | 7157 | NM_ | NC_ | 7676527 | antisense | GATCCAC | 2079. | AATGGAT | 2207. | AGG | 2 | 0.6108 |
| | Teffs | high | | 000546.5 | 000017.11 | | | TCACAGT | | CCACTCA | | | | |
| | | | | | | | | TTCCAT | | CAGTTTC | | | | |
| | | | | | | | | | | CATAGGT | | | | |
| | | | | | | | | | | CT | | | | |
| TP53 | IL2RA | IL2RA | 7157 | NM_ | NC_ | 7674864 | sense | GGTGCCC | 2080. | TGGTGGT | 2208. | AGG | 6 | 0.6259 |
| | Teff | high | | 000546.5 | 000017.11 | | | TATGAGC | | GCCCTAT | | | | |
| | | | | | | | | CGCCTG | | GAGCCG | | | | |
| | | | | | | | | | | CCTGAGG | | | | |
| | | | | | | | | | | TCT | | | | |
| ATXN7L3 | IL2RA | IL2RA | 56970 | NM_ | NC_ | 44197610 | sense | CACGGAC | 2081. | ACGACAC | 2209. | AGG | 2 | 0.6328 |
| | Teffs | high | | 001098833.1 | 000017.11 | | | CCTGATA | | GGACCCT | | | | |
| | | | | | | | | GCATGA | | GATAGCA | | | | |
| | | | | | | | | | | TGAAGG | | | | |
| | | | | | | | | | | ATT | | | | |
| ATXN7L3 | IL2RA | IL2RA | 56970 | NM_ | NC_ | 44197712 | sense | CATCGCT | 2082. | AGGCCAT | 2210. | CGG | 2 | 0.7491 |
| | Teffs | high | | 001098833.1 | 000017.11 | | | CAGGAG | | CGCTCAG | | | | |
| | | | | | | | | ATATACG | | GAGATAT | | | | |
| | | | | | | | | | | ACGCGG | | | | |
| | | | | | | | | | | ACC | | | | |
| ATXN7L3 | IL2RA | IL2RA | 56970 | NM_ | NC_ | 44197233 | sense | GCAGCC | 2083. | AACAGCA | 2211. | CGG | 3 | 0.6135 |
| | Teffs | high | | 001098833.1 | 000017.11 | | | GAATCGC | | GCCGAAT | | | | |
| | | | | | | | | CAACCGC | | CGCCAAC | | | | |
| | | | | | | | | | | CGCCGGT | | | | |
| | | | | | | | | | | GA | | | | |
| ATXN7L3 | IL2RA | IL2RA | 56970 | NM_ | NC_ | 44195424 | sense | GCTTCGC | 2084. | AGGAGC | 2212. | CGG | 8 | 0.6566 |
| | Teffs | high | | 001098833.1 | 000017.11 | | | AGCCTGC | | TTCGCAG | | | | |
| | | | | | | | | TAACCA | | CCTGCTA | | | | |
| | | | | | | | | | | ACCACGG | | | | |
| | | | | | | | | | | TGA | | | | |
| TFDP1 | IL2RA | IL2RA | 7027 | NM_ | NC_ | 1.14E+08 | sense | ACCGGCA | 2085. | AGAGAC | 2213. | TGG | 5 | 0.6315 |
| | Teffs | high | | 007111.4 | 000013.11 | | | GCGTCAA | | CGGCAG | | | | |
| | | | | | | | | ACACCC | | CGTCAAA | | | | |
| | | | | | | | | | | CACCCTG | | | | |
| | | | | | | | | | | GTGG | | | | |
| TFDP1 | IL2RA | IL2RA | 7027 | NM_ | NC_ | 1.14E+08 | sense | ATGACCA | 2086. | GCTTATG | 2214. | CGG | 7 | 0.6204 |
| | Teffs | high | | 007111.4 | 000013.11 | | | GAAAAA | | ACCAGAA | | | | |
| | | | | | | | | CATAAGA | | AAACATA | | | | |
| | | | | | | | | | | AGACGG | | | | |
| | | | | | | | | | | CGC | | | | |
| TFDP1 | IL2RA | IL2RA | 7027 | NM_ | NC_ | 1.14E+08 | antisense | CCTTCAT | 2087. | CAGACCT | 2215. | AGG | 6 | 0.6851 |
| | Teffs | high | | 007111.4 | 000013.11 | | | GGAGAA | | TCATGGA | | | | |
| | | | | | | | | ATGCCGT | | GAAATGC | | | | |
| | | | | | | | | | | CGTAGGC | | | | |
| | | | | | | | | | | CC | | | | |
| TFDP1 | IL2RA | IL2RA | 7027 | NM_ | NC_ | 1.14E+08 | sense | GGTGCA | 2088. | ACCTGGT | 2216. | CGG | 9 | 0.6402 |
| | Teffs | high | | 100711.4 | 000013.11 | | | GAGAAA | | GCAGAG | | | | |
| | | | | | | | | CCGGCAT | | AAACCG | | | | |
| | | | | | | | | G | | GCATGCG | | | | |
| | | | | | | | | | | GAGC | | | | |
| HNRNPK | IL2RA | IL2RA | 3190 | NM_ | NC_ | 83972098 | sense | ATGATGT | 2089. | TACAATG | 2217. | CGG | 11 | 0.7754 |
| | Teffs | high | | 002140.3 | 000009.12 | | | TTGATGA | | ATGTTTG | | | | |
| | | | | | | | | CCGTCG | | ATGACCG | | | | |
| | | | | | | | | | | TCGCGGA | | | | |
| | | | | | | | | | | CG | | | | |
| HNRNPK | IL2RA | IL2RA | 3190 | NM_ | NC_ | 83975465 | antisense | CTGTTGG | 2090. | TAAACTG | 2218. | GGG | 6 | 0.6273 |
| | Teffs | high | | 002140.3 | 000009.12 | | | GACATAC | | TTGGGAC | | | | |
| | | | | | | | | CGCTOG | | ATACCGC | | | | |
| | | | | | | | | | | TCGGGG | | | | |
| | | | | | | | | | | CCA | | | | |
| HNRNPK | IL2RA | IL2RA | 3190 | NM_ | NC_ | 83971978 | sense | GATGATA | 2091. | TTATGAT | 2219. | AGG | 11 | 0.7149 |
| | Teffs | high | | 002140.3 | 000009.12 | | | TGAGCCC | | GATATGA | | | | |
| | | | | | | | | TCGTCG | | GCCCTCG | | | | |
| | | | | | | | | | | TCGAGG | | | | |
| | | | | | | | | | | ACC | | | | |
| HNRNPK | IL2RA | IL2RA | 3190 | NM_ | NC_ | 83973291 | sense | TAAAATC | 2092. | GTGCTAA | 2220. | AGG | 9 | 0.6608 |
| | Teffs | high | | 002140.3 | 000009.12 | | | AAAGAA | | AATCAAA | | | | |
| | | | | | | | | CTTCGAG | | GAACTTC | | | | |
| | | | | | | | | | | GAGAGG | | | | |
| | | | | | | | | | | TAA | | | | |
| NFKB2 | IL2RA | IL2RA | 4791 | NM_ | NC_ | 1.02E+08 | sense | ACTCGAC | 2093. | CCCTACT | 2221. | CGG | 14 | 0.7089 |
| | Teffs | high | | 001077494.3 | 000010.11 | | | TACGGOG | | CGACTAC | | | | |
| | | | | | | | | TCACCG | | GGCGTCA | | | | |
| | | | | | | | | | | CCGCGG | | | | |
| | | | | | | | | | | ACG | | | | |
| NFKB2 | IL2RA | IL2RA | 4791 | NM_ | NC_ | 1.02E+08 | sense | CCCACTC | 2094. | ATATCCC | 2222. | GGG | 9 | 0.6913 |
| | Teffs | high | | 001077494.3 | 000010.11 | | | CATAGAA | | ACTCCAT | | | | |
| | | | | | | | | TCTCCG | | AGAATCT | | | | |
| | | | | | | | | | | CCGGGG | | | | |
| | | | | | | | | | | GCA | | | | |
| NFKB2 | IL2RA | IL2RA | 4791 | NM_ | NC_ | 1.02E+08 | sense | CTGCAAC | 2095. | GTTTCTG | 2223. | AGG | 11 | 0.6401 |
| | Teffs | high | | 001077494.3 | 000010.11 | | | TGAAACG | | CAACTGA | | | | |
| | | | | | | | | CAAGCG | | AACGCAA | | | | |
| | | | | | | | | | | GCGAGG | | | | |
| | | | | | | | | | | AGG | | | | |
| NFKB2 | IL2RA | IL2RA | 4791 | NM_ | NC_ | 1.02E+08 | sense | GGGACC | 2096. | ACGAGG | 2224. | TGG | 6 | 0.7003 |
| | Teffs | high | | 700107494.3 | 000010.11 | | | AGCCAA | | GACCAGC | | | | |
| | | | | | | | | GATCGA | | CAAGATC | | | | |
| | | | | | | | | GG | | GAGGTG | | | | |
| | | | | | | | | | | GACC | | | | |
| PRDM1 | IL2RA | IL2RA | 639 | NM_ | NC_ | 1.06E+08 | sense | AGGATG | 2097. | ATGGAG | 2225. | TGG | 2 | 0.7731 |
| | Teffs | high | | 001198.3 | 000006.12 | | | CGGATAT | | GATGCG | | | | |
| | | | | | | | | GACTCTG | | GATATGA | | | | |
| | | | | | | | | | | CTCTGTG | | | | |
| | | | | | | | | | | GACA | | | | |
| PRDM1 | IL2RA | IL2RA | 639 | NM_ | NC_ | 1.06E+08 | antisense | GGACGC | 2098. | CGTAGG | 2226. | AGG | 5 | 0.6665 |
| | Teffs | high | | 001198.3 | 000006.12 | | | GTTCAAG | | ACGCGTT | | | | |
| | | | | | | | | TAAGCGT | | CAAGTAA | | | | |
| | | | | | | | | | | GCGTAG | | | | |
| | | | | | | | | | | GAGT | | | | |
| PRDM1 | IL2RA | IL2RA | 639 | NM_ | NC_ | 1.06E+08 | antisense | GGGGAG | 2099. | AATGGG | 2227. | GGG | 5 | 0.6871 |
| | Teffs | high | | 001198.3 | 000006.12 | | | CGAGTG | | GGAGCG | | | | |
| | | | | | | | | ATGTACG | | AGTGATG | | | | |
| | | | | | | | | T | | TACGTGG | | | | |
| | | | | | | | | | | GTCT | | | | |
| PRDM1 | IL2RA | IL2RA | 639 | NM_ | NC_ | 1.06E+08 | sense | TTTGGAC | 2100. | CTCTTTT | 2228. | AGG | 4 | 0.6708 |
| | Teffs | high | | 001198.3 | 000006.12 | | | AGATCTA | | GGACAG | | | | |
| | | | | | | | | TTCCAG | | ATCTATT | | | | |
| | | | | | | | | | | CCAGAG | | | | |
| | | | | | | | | | | GGGA | | | | |
| MYC | IL2RA | IL2RA | 4609 | NM_ | NC_ | 1.28E+08 | sense | AGAGTG | 2101. | CCTCAGA | 2229. | TGG | 2 | 0.6543 |
| | Teffs | high | | 002467.4 | 000008.11 | | | CATCGAC | | GTGCATC | | | | |
| | | | | | | | | CCCTCGG | | GACCCCT | | | | |
| | | | | | | | | | | CGGTGGT | | | | |
| | | | | | | | | | | CT | | | | |
| MYC | IL2RA | IL2RA | 4609 | NM_ | NC_ | 1.28E+08 | antisense | CTGCGG | 2102. | TGCCCTG | 2230. | AGG | 2 | 0.6832 |
| | Teffs | high | | 002467.4 | 000008.11 | | | GGAGGA | | CGGGGA | | | | |
| | | | | | | | | CTCCGTC | | GGACTCC | | | | |
| | | | | | | | | G | | GTCGAG | | | | |
| | | | | | | | | | | GAGA | | | | |
| MYC | IL2RA | IL2RA | 4609 | NM_ | NC_ | 1.28E+08 | sense | CTTCGGG | 2103. | CTCCCTT | 2231 | CGG | 2 | 0.6919 |
| | Teffs | high | | 002467.4 | 000008.11 | | | GAGACA | | CGGGGA | | | | |
| | | | | | | | | ACGACG | | GACAAC | | | | |
| | | | | | | | | G | | GACGGC | | | | |
| | | | | | | | | | | GGTGG | | | | |
| MYC | IL2RA | IL2RA | 4609 | NM_ | NC_ | 1.28E+08 | antisense | GCTGCAC | 2104. | TACGGCT | 2232. | AGG | 2 | 0.6842 |
| | Teffs | high | | 002467.4 | 000008.11 | | | CGAGTCG | | GCACCGA | | | | |
| | | | | | | | | TAGTCG | | GTCGTAG | | | | |
| | | | | | | | | | | TCGAGGT | | | | |
| | | | | | | | | | | CA | | | | |
| SMARCB1 | IL2RA | IL2RA | 6598 | NM_ | NC_ | 23791773 | antisense | GAGAAC | 2105. | TACAGAG | 2233. | AGG | 2 | 0.731 |
| | Teffs | high | | 003073.3 | 000022.11 | | | CTCGGAA | | AACCTCG | | | | |
| | | | | | | | | CATACGG | | GAACATA | | | | |
| | | | | | | | | | | CGGAGG | | | | |
| | | | | | | | | | | TAG | | | | |
| SMARCB1 | IL2RA | IL2RA | 6598 | NM_ | NC_ | 23816887 | sense | GCAGATC | 2106. | GACAGC | 2234. | CGG | 6 | 0.6894 |
| | Teffs | high | | 003073.3 | 000022.11 | | | GAGTCCT | | AGATCGA | | | | |
| | | | | | | | | ACCCCA | | GTCCTAC | | | | |
| | | | | | | | | | | CCCACGG | | | | |
| | | | | | | | | | | ACA | | | | |
| SMARCB1 | IL2RA | IL2RA | 6598 | NM_ | NC_ | 23801049 | antisense | TCTTCTT | 2107. | GTTCTCT | 2235. | CGG | 4 | 0.6806 |
| | Teffs | high | | 003073.3 | 000022.11 | | | GTCTCGG | | TCTTGTC | | | | |
| | | | | | | | | CCCATG | | TCGGCCC | | | | |
| | | | | | | | | | | ATGCGGT | | | | |
| | | | | | | | | | | TC | | | | |
| SMARCB1 | IL2RA | IL2RA | 6598 | NM_ | NC_ | 23803342 | sense | TGAGAAC | 2108. | TCCATGA | 2236. | AGG | 5 | 0.6804 |
| | Teffs | high | | 003073.3 | 000022.11 | | | GCATCTC | | GAACGC | | | | |
| | | | | | | | | AGCCCG | | ATCTCAG | | | | |
| | | | | | | | | | | CCCGAG | | | | |
| | | | | | | | | | | GTGC | | | | |
| KLF13 | IL2RA | IL2RA | 51621 | NM_ | NC_ | 31327702 | sense | CCGACCT | 2109. | CGCGCCG | 2237. | AGG | 1 | 0.7221 |
| | Teffs | high | | 015995.3 | 000015.10 | | | CGAGTCC | | ACCTCGA | | | | |
| | | | | | | | | CCGCAG | | GTCCCCG | | | | |
| | | | | | | | | | | CAGAGG | | | | |
| | | | | | | | | | | AAG | | | | |
| KLF13 | IL2RA | IL2RA | 51621 | NM_ | NC_ | 31327415 | sense | CGTGGTG | 2110. | TCTTCGT | 2238. | CGG | 1 | 0.6798 |
| | Teffs | high | | 015995.3 | 000015.10 | | | GCGCGG | | GGTGGC | | | | |
| | | | | | | | | ATCCTAG | | GCGGATC | | | | |
| | | | | | | | | | | CTAGCGG | | | | |
| | | | | | | | | | | ACC | | | | |
| KLF13 | IL2RA | IL2RA | 51621 | NM_ | NC_ | 31327274 | sense | CGTGTCC | 2111. | GCCTCGT | 2239. | CGG | 1 | 0.7 |
| | Teffs | high | | 015995.3 | 000015.10 | | | ATGTCGA | | GTCCATG | | | | |
| | | | | | | | | GCCGCG | | TCGAGCC | | | | |
| | | | | | | | | | | GCGCGG | | | | |
| | | | | | | | | | | TCG | | | | |
| KLF13 | IL2RA | IL2RA | 51621 | NM_ | NC_ | 31327767 | antisense | GAGTTCT | 2112. | GTGTGA | 2240. | AGG | 1 | 0.592 |
| | Teffs | high | | 015995.3 | 000015.10 | | | CAGGTGC | | GTTCTCA | | | | |
| | | | | | | | | GCCTTG | | GGTGCG | | | | |
| | | | | | | | | | | CCTTGAG | | | | |
| | | | | | | | | | | GTGC | | | | |
| IRF1 | IL2RA | IL2RA | 3659 | NM_ | NC_ | 1.32E+08 | sense | GAACTCC | 2113. | CCATGAA | 2241. | AGG | 4 | 0.6297 |
| | Teffs | high | | 002198.2 | 000005.10 | | | CTGCCAG | | CTCCCTG | | | | |
| | | | | | | | | ATATCG | | CCAGATA | | | | |
| | | | | | | | | | | TCGAGG | | | | |
| | | | | | | | | | | AGG | | | | |
| IRF1 | IL2RA | IL2RA | 3659 | NM_ | NC_ | 1.32E+08 | sense | TCTAGGC | 2114. | GCCCTCT | 2242. | GGG | 4 | 0.718 |
| | Teffs | high | | 002198.2 | 000005.10 | | | CGATACA | | AGGCCG | | | | |
| | | | | | | | | AAGCAG | | ATACAAA | | | | |
| | | | | | | | | | | GCAGGG | | | | |
| | | | | | | | | | | GAAA | | | | |
| IRF1 | IL2RA | IL2RA | 3659 | NM_ | NC_ | 1.32E+08 | sense | TCTCCCT | 2115. | GCTTTCT | 2243. | GGG | 6 | 0.6137 |
| | Teffs | high | | 002198.2 | 000005.10 | | | CGACAGT | | CCCTCGA | | | | |
| | | | | | | | | CATGTG | | CAGTCAT | | | | |
| | | | | | | | | | | GTGGGG | | | | |
| | | | | | | | | | | ATT | | | | |
| IRF1 | IL2RA | IL2RA | 3659 | NM_ | NC_ | 1.32E+08 | sense | TTAATTC | 2116. | CAGATTA | 2244. | GGG | 2 | 0.7113 |
| | Teffs | high | | 002198.2 | 000005.10 | | | CAACCAA | | ATTCCAA | | | | |
| | | | | | | | | ATCCCG | | CCAAATC | | | | |
| | | | | | | | | | | CCGGGG | | | | |
| | | | | | | | | | | CTC | | | | |
| FOXO1 | IL2RA | IL2RA | 2308 | NM_ | NC_ | 40665740 | antisense | ACAGGTT | 2117. | TAGGACA | 2245. | CGG | 1 | 0.547 |
| | Teffs | high | | 002015.3 | 000013.11 | | | GCCCCAC | | GGTTGCC | | | | |
| | | | | | | | | GCGTTG | | CCACGCG | | | | |
| | | | | | | | | | | TTGCGGC | | | | |
| | | | | | | | | | | GG | | | | |
| FOXO1 | IL2RA | IL2RA | 2308 | NM_ | NC_ | 40666107 | sense | GGAGTTT | 2118. | GGCCGG | 2246. | CGG | 1 | 0.629 |
| | Teffs | high | | 002015.3 | 000013.11 | | | AGCCAGT | | AGTTTAG | | | | |
| | | | | | | | | CCAACT | | CCAGTCC | | | | |
| | | | | | | | | | | AACTCGG | | | | |
| | | | | | | | | | | CCA | | | | |
| FOXO1 | IL2RA | IL2RA | 2308 | NM_ | NC_ | 40560279 | antisense | GGTGGC | 2119. | GTTTGGT | 2247. | CGG | 2 | 0.6741 |
| | Teffs | high | | 002015.3 | 000013.11 | | | GCAAAC | | GGCGCA | | | | |
| | | | | | | | | GAGTAG | | AACGAGT | | | | |
| | | | | | | | | CA | | AGCACG | | | | |
| | | | | | | | | | | GCGT | | | | |
| FOXO1 | IL2RA | IL2RA | 2308 | NM_ | NC_ | 40560544 | antisense | TAGCATT | 2120. | GTACTAG | 2248. | GGG | 2 | 0.6665 |
| | Teffs | high | | 002015.3 | 000013.11 | | | TGAGCTA | | CATTTGA | | | | |
| | | | | | | | | GTTCGA | | GCTAGTT | | | | |
| | | | | | | | | | | CGAGGG | | | | |
| | | | | | | | | | | CGA | | | | |
| IRF2 | IL2RA | IL2RA | 3660 | NM_ | NC_ | 1.84E+08 | sense | ACCTGAT | 2121. | ATAAACC | 2249. | AGG | 4 | 0.6049 |
| | Teffs | high | | 002199.3 | 000004.12 | | | CCCAAAA | | TGATCCC | | | | |
| | | | | | | | | CATGGA | | AAAACAT | | | | |
| | | | | | | | | | | GGAAGG | | | | |
| | | | | | | | | | | CGA | | | | |
| IRF2 | IL2RA | IL2RA | 3660 | NM_ | NC_ | 1.84E+08 | antisense | CAGCATT | 2122. | GGGGCA | 2250. | AGG | 4 | 0.6028 |
| | Teffs | high | | 002199.3 | 000004.12 | | | CGGTAG | | GCATTCG | | | | |
| | | | | | | | | ACCCTGA | | GTAGACC | | | | |
| | | | | | | | | | | CTGAAG | | | | |
| | | | | | | | | | | GCAT | | | | |
| IRF2 | IL2RA | IL2RA | 3660 | NM_ | NC_ | 1.84E+08 | sense | GGATGC | 2123. | CCCTGGA | 2251. | GGG | 3 | 0.6231 |
| | Teffs | high | | 002199.3 | 000004.12 | | | ATGCGGC | | TGCATGC | | | | |
| | | | | | | | | TAGACAT | | GGCTAG | | | | |
| | | | | | | | | | | ACATGG | | | | |
| | | | | | | | | | | GTGG | | | | |
| IRF2 | IL2RA | IL2RA | 3660 | NM_ | NC_ | 1.84E+08 | antisense | TACCTGC | 2124. | CGCTTAC | 2252. | GGG | 7 | 0.7207 |
| | Teffs | high | | 002199.3 | 000004.12 | | | ATAGGA | | CTGCATA | | | | |
| | | | | | | | | AGACAC | | GGAAGA | | | | |
| | | | | | | | | G | | CACGGG | | | | |
| | | | | | | | | | | GGAG | | | | |
| KLF2 | IL2RA | IL2RA | 10365 | NM_ | NC_ | 16325729 | antisense | AAACCAG | 2125. | GCCGAA | 2253. | CGG | 2 | 0.5997 |
| | Teffs | high | | 016270.2 | 000019.10 | | | GGCCACC | | ACCAGG | | | | |
| | | | | | | | | GAAAGG | | GCCACCG | | | | |
| | | | | | | | | | | AAAGGC | | | | |
| | | | | | | | | | | GGCGG | | | | |
| KLF2 | IL2RA | IL2RA | 10365 | NM_ | NC_ | 16325576 | antisense | CCCTCGC | 2126. | GGCGCCC | 2254. | CGG | 2 | 0.5868 |
| | Teffs | high | | 016270.2 | 000019.10 | | | GCTTGAG | | TCGCGCT | | | | |
| | | | | | | | | GCCGCG | | TGAGGCC | | | | |
| | | | | | | | | | | GCGCGG | | | | |
| | | | | | | | | | | TCC | | | | |
| KLF2 | IL2RA | IL2RA | 10365 | NM_ | NC_ | 16325811 | sense | CTTCGGT | 2127. | CAGCCTT | 2255. | CGG | 2 | 0.7252 |
| | Teffs | high | | 016270.2 | 000019.10 | | | CTCTTCG | | CGGTCTC | | | | |
| | | | | | | | | ACGACG | | TTCGACG | | | | |
| | | | | | | | | | | ACGCGG | | | | |
| | | | | | | | | | | CCG | | | | |
| KLF2 | IL2RA | IL2RA | 10365 | NM_ | NC_ | 16325354 | antisense | TCGGGGT | 2128. | GGGTTCG | 2256. | CGG | 2 | 0.6967 |
| | Teffs | high | | 016270.2 | 000019.10 | | | AATAGAA | | GGGTAAT | | | | |
| | | | | | | | | CGCAGG | | AGAACG | | | | |
| | | | | | | | | | | CAGGCG | | | | |
| | | | | | | | | | | GCGG | | | | |
| ZNF217 | IL2RA | IL2RA | 7764 | NM_ | NC_ | 53581993 | sense | CAAAATC | 2129. | AGACCAA | 2257. | GGG | 1 | 0.6608 |
| | Teffs | high | | 006526.2 | 000020.11 | | | TCACCCT | | AATCTCA | | | | |
| | | | | | | | | GAAACG | | CCCTGAA | | | | |
| | | | | | | | | | | ACGGGG | | | | |
| | | | | | | | | | | ÅAG | | | | |
| ZNF217 | IL2RA | IL2RA | 7764 | NM_ | NC_ | 53581749 | sense | CCACGGC | 2130. | ACTCCCA | 2258. | TGG | 1 | 0.6177 |
| | Teffs | high | | 006526.2 | 000020.11 | | | GAAGCG | | CGGCGA | | | | |
| | | | | | | | | CCCTCCG | | AGCGCCC | | | | |
| | | | | | | | | | | TCCGTGG | | | | |
| | | | | | | | | | | ACG | | | | |
| ZNF217 | IL2RA | IL2RA | 7764 | NM_ | NC_ | 53582284 | sense | GGACAC | 2131. | ATGGGG | 2259. | GGG | 1 | 0.7154 |
| | Teffs | high | | 006526.2 | 000020.11 | | | ATAATGG | | ACACATA | | | | |
| | | | | | | | | CAAATCG | | ATGGCAA | | | | |
| | | | | | | | | | | ATCGGG | | | | |
| | | | | | | | | | | GGCC | | | | |
| ZNF217 | IL2RA | IL2RA | 7764 | NM_ | NC_ | 53576811 | antisense | TGGGTG | 2132. | GTTATGG | 2260. | AGG | 3 | 0.6707 |
| | Teffs | high | | 006526.2 | 000020.11 | | | GTACTGC | | GTGGTAC | | | | |
| | | | | | | | | CATCCGG | | TGCCATC | | | | |
| | | | | | | | | | | CGGAGG | | | | |
| | | | | | | | | | | AGG | | | | |
| TNFAIP3 | IL2RA | IL2RA | 7128 | NM_ | NC_ | 1.38E+08 | sense | CCACTTG | 2133. | TGTTCCA | 2261. | GGG | 6 | 0.6901 |
| | Teffs | high | | 001270507.1 | 000006.12 | | | TTAACAG | | CTTGTTA | | | | |
| | | | | | | | | AGACCG | | ACAGAG | | | | |
| | | | | | | | | | | ACCGGG | | | | |
| | | | | | | | | | | GAAG | | | | |
| TNFAIP3 | IL2RA | IL2RA | 7128 | NM_ | NC_ | 1.38E+08 | sense | CTTGTGG | 2134. | GAAGCTT | 2262. | CGG | 2 | 0.6709 |
| | Teffs | high | | 001270507.1 | 000006.12 | | | CGCTGAA | | GTGGCG | | | | |
| | | | | | | | | AACGAA | | CTGAAAA | | | | |
| | | | | | | | | | | CGAACG | | | | |
| | | | | | | | | | | GTAA | | | | |
| TNFAIP3 | IL2RA | IL2RA | 7128 | NM_ | NC_ | 1.38E+08 | sense | TATGCCA | 2135. | CCTTTAT | 2263. | AGG | 7 | 0.7533 |
| | Teffs | high | | 001270507.1 | 000006.12 | | | TGAGTGC | | GCCATGA | | | | |
| | | | | | | | | TCAGAG | | GTGCTCA | | | | |
| | | | | | | | | | | GAGAGG | | | | |
| | | | | | | | | | | CGG | | | | |
| TNFAIP3 | IL2RA | IL2RA | 7128 | NM_ | NC_ | 1.38E+08 | antisense | TGAGAG | 2136. | GATTTGA | 2264. | CGG | 3 | 0.6393 |
| | Teffs | high | | 001270507.1 | 000006.12 | | | ACTCCAG | | GAGACTC | | | | |
| | | | | | | | | TTGCCAG | | CAGTTGC | | | | |
| | | | | | | | | | | CAGCGG | | | | |
| | | | | | | | | | | AAT | | | | |
| FOXK1 | IL2RA | IL2RA | 221937 | NM_ | NC_ | 4757132 | sense | AACAGG | 2137. | GTGGAA | 2265. | AGG | 5 | 0.6681 |
| | Teffs | high | | 001037165.1 | 000007.14 | | | CATTCCG | | CAGGCAT | | | | |
| | | | | | | | | GAAACG | | TCCGGAA | | | | |
| | | | | | | | | G | | ACGGAG | | | | |
| | | | | | | | | | | GCAG | | | | |
| FOXK1 | IL2RA | IL2RA | 221937 | NM_ | NC_ | 4754516 | antisense | AGGTCAC | 2138. | TCCGAGG | 2266. | CGG | 3 | 0.734 |
| | Teffs | high | | 001037165.1 | 000007.14 | | | GTTCTGC | | TCACGTT | | | | |
| | | | | | | | | ACAAAG | | CTGCACA | | | | |
| | | | | | | | | | | AAGCGG | | | | |
| | | | | | | | | | | TAA | | | | |
| FOXK1 | IL2RA | IL2RA | 221937 | NM_ | NC_ | 4759162 | antisense | CTAACTT | 2139. | GAAGCTA | 2267 | GGG | 6 | 0.6672 |
| | Teffs | high | | 001037165.1 | 000007.14 | | | GGACCCA | | ACTTGGA | | | | |
| | | | | | | | | AACTCA | | CCCAAAC | | | | |
| | | | | | | | | | | TCAGGGT | | | | |
| | | | | | | | | | | CG | | | | |
| FOXK1 | IL2RA | IL2RA | 221937 | NM_ | NC_ | 4755361 | sense | GCATTAC | 2140. | CCAAGCA | 2268. | CGG | 4 | 0.7131 |
| | Teffs | high | | 001037165.1 | 000007.14 | | | CCCTACT | | TTACCCC | | | | |
| | | | | | | | | ACCGGA | | TACTACC | | | | |
| | | | | | | | | | | GGACGG | | | | |
| | | | | | | | | | | CCG | | | | |
| MYB | IL2RA | IL2RA | 4602 | NM_ | NC_ | 1.35E+08 | sense | ACCAGGC | 2141. | ATTTACC | 2269. | GGG | 5 | 0.6859 |
| | Teffs | high | | 005375.2 | 000006.12 | | | ACACAAG | | AGGCAC | | | | |
| | | | | | | | | AGACTG | | ACAAGA | | | | |
| | | | | | | | | | | GACTGG | | | | |
| | | | | | | | | | | GGAAC | | | | |
| MYB | IL2RA | IL2RA | 4602 | NM_ | NC_ | 1.35E+08 | sense | AGAAATA | 2142. | GTACAGA | 2270. | TGG | 5 | 0.6009 |
| | Teffs | high | | 005375.2 | 000006.12 | | | CGGTCCG | | AATACGG | | | | |
| | | | | | | | | AAACGT | | TCCGAAA | | | | |
| | | | | | | | | | | CGTTGGT | | | | |
| | | | | | | | | | | CT | | | | |
| MYB | IL2RA | IL2RA | 4602 | NM_ | NC_ | 1.35E+08 | sense | AGTCTGG | 2143. | CCCAAGT | 2271. | GGG | 2 | 0.7063 |
| | Teffs | high | | 005375.2 | 000006.12 | | | AAAGCGT | | CTGGAAA | | | | |
| | | | | | | | | CACTTG | | GCGTCAC | | | | |
| | | | | | | | | | | TTGGGG | | | | |
| | | | | | | | | | | AAA | | | | |
| MYB | IL2RA | IL2RA | 4602 | NM_ | NC_ | 1.35E+08 | antisense | TATTTAC | 2144. | ACTATAT | 2272. | GGG | 7 | 0.6157 |
| | Teffs | high | | 005375.2 | 000006.12 | | | ATGTAAC | | TTACATG | | | | |
| | | | | | | | | GCTACA | | TAACGCT | | | | |
| | | | | | | | | | | ACAGGG | | | | |
| | | | | | | | | | | TAT | | | | |
| CBFB | IL2RA | IL2RA | 865 | NM_ | NC_ | 67036720 | antisense | AAGTCGA | 2145. | TTCTAAG | 2273. | AGG | 3 | 0.5993 |
| | Teffs | high | | 001755.2 | 100006.10 | | | CATACTC | | TCGACAT | | | | |
| | | | | | | | | TCGGCT | | ACTCTCG | | | | |
| | | | | | | | | | | GCTAGGT | | | | |
| | | | | | | | | | | GT | | | | |
| CBFB | IL2RA | IL2RA | 865 | NM_ | NC_ | 67029479 | antisense | CCTGCCT | 2146. | CCCGCCT | 2274. | CGG | 1 | 0.6743 |
| | Teffs | high | | 001755.2 | 000016.10 | | | CACCTCA | | GCCTCAC | | | | |
| | | | | | | | | CACTCG | | CTCACAC | | | | |
| | | | | | | | | | | TCGCGGC | | | | |
| | | | | | | | | | | TC | | | | |
| CBFB | IL2RA | IL2RA | 865 | NM_ | NC_ | 67029807 | antisense | GCCGACT | 2147. | GCCAGCC | 2275. | CGG | 2 | 0.7383 |
| | Teffs | high | | 001755.2 | 000016.10 | | | TACGATT | | GACTTAC | | | | |
| | | | | | | | | TCCGAG | | GATTTCC | | | | |
| | | | | | | | | | | GAGCGG | | | | |
| | | | | | | | | | | CCG | | | | |
| CBFB | IL2RA | IL2RA | 865 | NM_ | NC_ | 67066729 | sense | GGAGTCT | 2148. | GAATGG | 2276. | AGG | 4 | 0.5938 |
| | Teffs | high | | 001755.2 | 000016.10 | | | GTGTTAT | | AGTCTGT | | | | |
| | | | | | | | | CTGGAA | | GTTATCT | | | | |
| | | | | | | | | | | GGAAAG | | | | |
| | | | | | | | | | | GCTG | | | | |
| HIVEP2 | IL2RA | IL2RA | 3097 | NM_ | NC_ | 1.43E+08 | antisense | CCCTGGA | 2149. | CGGTCCC | 2277. | CGG | 5 | 0.6747 |
| | Teffs | high | | 006734.3 | 000006.12 | | | TAGAATA | | TGGATAG | | | | |
| | | | | | | | | CATCGT | | AATACAT | | | | |
| | | | | | | | | | | CGTCGGA | | | | |
| | | | | | | | | | | AC | | | | |
| HIVEP2 | IL2RA | IL2RA | 3097 | NM_ | NC_ | 1.43E+08 | sense | GACAAG | 2150. | TTCAGAC | 2278. | GGG | 5 | 0.7382 |
| | Teffs | high | | 006734.3 | 000006.12 | | | ATGTCAG | | AAGATGT | | | | |
| | | | | | | | | ACCTAGG | | CAGACCT | | | | |
| | | | | | | | | | | AGGGGG | | | | |
| | | | | | | | | | | CAG | | | | |
| HIVEP2 | IL2RA | IL2RA | 3097 | NM_ | NC_ | 1.43E+08 | antisense | GAGGTG | 2151. | GTCAGA | 2279. | GGG | 5 | 0.6922 |
| | Teffs | high | | 006734.3 | 000006.12 | | | GAAGGT | | GGTGGA | | | | |
| | | | | | | | | AAACACA | | AGGTAA | | | | |
| | | | | | | | | A | | ACACAAG | | | | |
| | | | | | | | | | | GGGAT | | | | |
| HIVEP2 | IL2RA | IL2RA | 3097 | NM_ | NC_ | 1.43E+08 | antisense | TTCTAGG | 2152. | TTTTTTCT | 2280. | TGG | 5 | 0.71 |
| | Teffs | high | | 006734.3 | 000006.12 | | | ATAACCA | | AGGATA | | | | |
| | | | | | | | | CCACTG | | ACCACCA | | | | |
| | | | | | | | | | | CTGTGGC | | | | |
| | | | | | | | | | | CA | | | | |
| MED12 | IL2RA | IL2RA | 9968 | NM_ | NC_ | 71130165 | sense | ACATCGA | 2153. | ATCCACA | 2281. | AGG | 28 | 0.6457 |
| | Teffs | high | | 005120.2 | 000023.11 | | | CTGCTGG | | TCGACTG | | | | |
| | | | | | | | | ACAATG | | CTGGACA | | | | |
| | | | | | | | | | | ATGAGG | | | | |
| | | | | | | | | | | ATG | | | | |
| MED12 | IL2RA | IL2RA | 9968 | NM_0051 | NC_ | 7112223 | antisense | CAGTGA | 2154. | CAGTCAG | 2282. | AGG | 8 | 0.688 |
| | | | | 005120.2 | 000023.11 | | | CAAACCA | | TGAGTAG | | | | |
| | | | | | | | | | | TGCCAAA | | | | |
| | | | | | | | | | | CCAAGGC | | | | |
| | | | | | | | | | | AC | | | | |
| MED12 | IL2RA | IL2RA | 9968 | NM_ | NC_ | 71125111 | antisense | GTGGCGT | 2155. | ATGGGT | 2283. | TGG | 15 | 0.6661 |
| | Teffs | high | | 005120.2 | 000023.11 | | | ACTGCAC | | GGCGTAC | | | | |
| | | | | | | | | GTGTCG | | TGCACGT | | | | |
| | | | | | | | | | | GTCGTGG | | | | |
| | | | | | | | | | | CTG | | | | |
| MED12 | IL2RA | IL2RA | 9968 | NM_ | NC_ | 71126138 | sense | TTCACAT | 2156. | ACCTTTC | 2284. | AGG | 18 | 0.6594 |
| | Teffs | high | | 005120.2 | 000023.11 | | | TATGACC | | ACATTAT | | | | |
| | | | | | | | | AACACC | | GACCAAC | | | | |
| | | | | | | | | | | ACCAGGT | | | | |
| | | | | | | | | | | CA | | | | |

TABLE 14
Nuclear factors that can be inhibited to decrease IL2RA expression or overexpressed to increase IL2RA expression in
effector T cells and regulatory T cells

| | | | | | | Position of | | | | | | | | |
|---|---|---|---|---|---|---|---|---|---|---|---|---|---|---|
| | | | | | | Base After | | sgRNA | SEQ | Target | SEQ | | | |
| | screen_ | screen_ | Target | Target | Genomic | Cut (1- | | Target | ID | Context | ID | PAM | Exon | Rule Set |
| gene_id | target | direction | Gene ID | Transcript | Sequence | based) | Strand | Sequence | NO: | Sequence | NO: | Sequence | Number | 2 score |
| FOXO1 | IL2RA | IL2RA low | 2308 | NM_ | NC_ | 40665740 | antisense | ACAGGTT | 2285. | TAGGACA | 2429. | CGG | 1 | 0.547 |
| | Tregs | | | 002015.3 | 000013.11 | | | GCCCCACG | | GGTTGCCC | | | | |
| | | | | | | | | CGTTG | | CACGCGTT | | | | |
| | | | | | | | | | | GCGGCGG | | | | |
| FOXO1 | IL2RA | IL2RA low | 2308 | NM_ | NC_ | 40666107 | sense | GGAGTTTA | 2286. | GGCCGGA | 2430. | CGG | 1 | 0.629 |
| | Tregs | | | 002015.3 | 000013.11 | | | GCCAGTCC | | GTTTAGCC | | | | |
| | | | | | | | | AACT | | AGTCCAAC | | | | |
| | | | | | | | | | | TCGGCCA | | | | |
| FOXO1 | IL2RA | IL2RA low | 2308 | NM_ | NC_ | 40560279 | antisense | GGTGGCG | 2287. | GTTTGGTG | 2431. | CGG | 2 | 0.6741 |
| | Tregs | | | 002015.3 | 000013.11 | | | CAAACGA | | GCGCAAA | | | | |
| | | | | | | | | GTAGCA | | CGAGTAG | | | | |
| | | | | | | | | | | CACGGCG | | | | |
| | | | | | | | | | | T | | | | |
| FOXO1 | IL2RA | IL2RA low | 2308 | NM_ | NC_ | 40560544 | antisense | TAGCATTT | 2288. | GTACTAGC | 2432. | GGG | 2 | 0.6665 |
| | Tregs | | | 002015.3 | 000013.11 | | | GAGCTAG | | ATTTGAGC | | | | |
| | | | | | | | | TTCGA | | TAGTTCGA | | | | |
| | | | | | | | | | | GGGCGA | | | | |
| PTEN | IL2RA | IL2RA low | 5728 | NM_ | NC_ | 87961027 | sense | AGAGCGT | 2289. | GTATAGA | 2433. | AGG | 8 | 0.7179 |
| | Tregs | | | 001304718.1 | 000010.11 | | | GCAGATA | | GCGTGCA | | | | |
| | | | | | | | | ATGACA | | GATAATGA | | | | |
| | | | | | | | | | | CAAGGAA | | | | |
| | | | | | | | | | | T | | | | |
| PTEN | IL2RA | IL2RA low | 5728 | NM_ | NC_ | 87957861 | antisense | AGCTGGC | 2290. | CTTTAGCT | 2434. | AGG | 7 | 0.6493 |
| | Tregs | | | 001304718.1 | 000010.11 | | | AGACCACA | | GGCAGAC | | | | |
| | | | | | | | | AACTG | | CACAAACT | | | | |
| | | | | | | | | | | GAGGATC | | | | |
| PTEN | IL2RA | IL2RA low | 5728 | NM_ | NC_ | 87960940 | sense | ATTCTTCA | 2291. | ATACATTC | 2435. | AGG | 8 | 0.6697 |
| | Tregs | | | 001304718.1 | 000010.11 | | | TACCAGGA | | TTCATACC | | | | |
| | | | | | | | | CCAG | | AGGACCA | | | | |
| | | | | | | | | | | GAGGAAA | | | | |
| PTEN | IL2RA | IL2RA low | 5728 | NM_ | NC_ | 87957915 | sense | CCAATTCA | 2292. | TCCTCCAA | 2436. | CGG | 7 | 0.6752 |
| | Tregs | | | 001304718.1 | 000010.11 | | | GGACCCAC | | TTCAGGAC | | | | |
| | | | | | | | | ACGA | | CCACACGA | | | | |
| | | | | | | | | | | CGGGAA | | | | |
| STAT5B | IL2RA | IL2RA low | 6777 | NM_ | NC_ | 42216055 | sense | CAGCCAG | 2293. | ATGGCAG | 2437. | CGG | 12 | 0.6375 |
| | Tregs | | | 012448.3 | 000017.11 | | | GACAACA | | CCAGGAC | | | | |
| | | | | | | | | ATGCGA | | AACAATGC | | | | |
| | | | | | | | | | | GACGGCC | | | | |
| | | | | | | | | | | A | | | | |
| STAT5B | IL2RA | IL2RA low | 6777 | NM_ | NC_ | 42227658 | antisense | GTGGCCTT | 2294. | CTGGGTG | 2438. | TGG | 3 | 0.6157 |
| | Tregs | | | 012448.3 | 000017.11 | | | AATGTTCT | | GCCTTAAT | | | | |
| | | | | | | | | CCTG | | GTTCTCCT | | | | |
| | | | | | | | | | | GTGGATT | | | | |
| STAT5B | IL2RA | IL2RA low | 6777 | NM_ | NC_ | 42224822 | antisense | GTTCATTG | 2295. | CTCTGTTC | 2439. | CGG | 4 | 0.6583 |
| | Tregs | | | 012448.3 | 000017.11 | | | TACAATAT | | ATTGTACA | | | | |
| | | | | | | | | ATGG | | ATATATGG | | | | |
| | | | | | | | | | | CGGATG | | | | |
| STAT5B | IL2RA | IL2RA low | 6777 | NM_ | NC_ | 42217252 | sense | TAAGAGG | 2296. | GAATTAAG | 2440. | GGG | 11 | 0.7097 |
| | Tregs | | | 012448.3 | 000017.11 | | | TCAGACCG | | AGGTCAG | | | | |
| | | | | | | | | TCGTG | | ACCGTCGT | | | | |
| | | | | | | | | | | GGGGCAG | | | | |
| IL2RA | IL2RA | IL2RA low | 3559 | NM_ | NC_ | 6021673 | sense | CTGCAGG | 2297. | GTCACTGC | 2441. | GGG | 4 | 0.5815 |
| | Tregs | | | 000417.2 | 000010.11 | | | GAACCTCC | | AGGGAAC | | | | |
| | | | | | | | | ACCAT | | CTCCACCA | | | | |
| | | | | | | | | | | TGGGAAA | | | | |
| IL2RA | IL2RA | IL2RA low | 3559 | NM_ | NC_ | 6021582 | sense | GGATACA | 2298. | CCAGGGA | 2442. | AGG | 4 | 0.7695 |
| | Tregs | | | 000417.2 | 000010.11 | | | GGGCTCTA | | TACAGGG | | | | |
| | | | | | | | | CACAG | | CTCTACAC | | | | |
| | | | | | | | | | | AGAGGTC | | | | |
| | | | | | | | | | | C | | | | |
| IL2RA | IL2RA | IL2RA low | 3559 | NM_ | NC_ | 6025992 | antisense | TGGCTTTG | 2299. | GCCATGG | 2443. | GGG | 2 | 0.6265 |
| | Tregs | | | 000417.2 | 000010.11 | | | AATGTGG | | CTTTGAAT | | | | |
| | | | | | | | | CGTGT | | GTGGCGT | | | | |
| | | | | | | | | | | GTGGGAT | | | | |
| | | | | | | | | | | C | | | | |
| IL2RA | IL2RA | IL2RA low | 3559 | NM_ | NC_ | 6024349 | antisense | TTGTTTCG | 2300 | TCACTTGT | 2444. | TGG | 3 | 0.6476 |
| | Tregs | | | 000417.2 | 000010.11 | | | TTGTGTTC | | TTCGTTGT | | | | |
| | | | | | | | | CGAG | | GTTCCGAG | | | | |
| | | | | | | | | | | TGGCTA | | | | |
| ATXN7L3 | IL2RA | IL2RA low | S6970 | NM_ | NC_ | 44197610 | sense | CACGGACC | 2301. | ACGACAC | 2445. | AGG | 2 | 0.6328 |
| | Tregs | | | 800109833.1 | 000017.11 | | | CTGATAGC | | GGACCCT | | | | |
| | | | | | | | | ATGA | | GATAGCAT | | | | |
| | | | | | | | | | | GAAGGAT | | | | |
| | | | | | | | | | | T | | | | |
| ATXN7L3 | IL2RA | IL2RA low | 56970 | NM_ | NC_ | 44197712 | sense | CATCGCTC | 2302. | AGGCCATC | 2446. | CGG | 2 | 0.7491 |
| | Tregs | | | 001098833.1 | 000017.11 | | | AGGAGAT | | GCTCAGG | | | | |
| | | | | | | | | ATACG | | AGATATAC | | | | |
| | | | | | | | | | | GCGGACC | | | | |
| ATXN7L3 | IL2RA | IL2RA low | 56970 | NM_ | NC_ | 44197233 | sense | GCAGCCG | 2303. | AACAGCA | 2447. | CGG | 3 | 0.6135 |
| | Tregs | | | 001098833.1 | 000017.11 | | | AATCGCCA | | GCCGAATC | | | | |
| | | | | | | | | ACCGC | | GCCAACCG | | | | |
| | | | | | | | | | | CCGGTGA | | | | |
| ATXN7L3 | IL2RA | IL2RA low | S6970 | NM_ | NC_ | 44195424 | sense | GCTTCGCA | 2304. | AGGAGCT | 2448. | CGG | 8 | 0.6566 |
| | Tregs | | | 001098833.1 | 000017.11 | | | GCCTGCTA | | TCGCAGCC | | | | |
| | | | | | | | | ACCA | | TGCTAACC | | | | |
| | | | | | | | | | | ACGGTGA | | | | |
| RELA | IL2RA | IL2RA low | 5970 | NM_ | NC_ | 65659757 | sense | ACTACGAC | 2305. | GGGGACT | 2449. | CGG | 6 | 0.7259 |
| | Tregs | | | 001243984.1 | 000011.10 | | | CTGAATGC | | ACGACCTG | | | | |
| | | | | | | | | TGTG | | AATGCTGT | | | | |
| | | | | | | | | | | GCGGCTC | | | | |
| RELA | IL2RA | IL2RA low | 5970 | NM_ | NC_ | 65662009 | sense | GCTTCCGC | 2306. | ATGCGCTT | 2450. | GGG | 3 | 0.7137 |
| | Tregs | | | 001243984.1 | 000011.10 | | | TACAAGTG | | CCGCTACA | | | | |
| | | | | | | | | CGAG | | AGTGCGA | | | | |
| | | | | | | | | | | GGGGCGC | | | | |
| RELA | IL2RA | IL2RA low | 5970 | NM_ | NC_ | 65658759 | antisense | GGAAGAT | 2307. | AGTAGGA | 2451. | AGG | 7 | 0.7554 |
| | Tregs | | | 001243984.1 | 000011.10 | | | CTCATCCC | | AGATCTCA | | | | |
| | | | | | | | | CACCG | | TCCCCACC | | | | |
| | | | | | | | | | | GAGGCAG | | | | |
| RELA | IL2RA | IL2RA low | 5970 | NM_ | NC_ | 65661818 | sense | TCAATGGC | 2308. | CAGATCAA | 2452. | GGG | 4 | 0.7164 |
| | Tregs | | | 001243984.1 | 000011.10 | | | TACACAGG | | TGGCTACA | | | | |
| | | | | | | | | ACCA | | CAGGACC | | | | |
| | | | | | | | | | | AGGGACA | | | | |
| FOXP1 | IL2RA | ILZRA low | 27086 | NM_ | NC_ | 71041428 | antisense | AGAGGAG | 2309. | GTGCAGA | 2453. | TGG | 11 | 0.6926 |
| | Tregs | | | 032682.5 | 000003.12 | | | GAGACAC | | GGAGGAG | | | | |
| | | | | | | | | ATGTCG | | ACACATGT | | | | |
| | | | | | | | | | | CGTGGTCA | | | | |
| FOXP1 | IL2RA | IL2RA low | 27086 | NM_ | NC_ | 71015617 | antisense | CATACACC | 2310. | CTTGCATA | 2454. | AGG | 12 | 0.6547 |
| | Tregs | | | 032682.5 | 000003.12 | | | ATGTCCAT | | CACCATGT | | | | |
| | | | | | | | | AGAG | | CCATAGAG | | | | |
| | | | | | | | | | | AGGATG | | | | |
| FOXP1 | IL2RA | IL2RA low | 27086 | NM_ | NC_ | 71046982 | sense | GCCTTCTG | 2311. | CAAGGCCT | 2455. | GGG | 10 | 0.5683 |
| | Tregs | | | 032682.5 | 000003.12 | | | ACAATTCA | | TCTGACAA | | | | |
| | | | | | | | | GCCC | | TTCAGCCC | | | | |
| | | | | | | | | | | GGGCAG | | | | |
| FOXP1 | IL2RA | IL2RA low | 27086 | NM_ | NC_ | 70988031 | antisense | GTTCTGTA | 2312. | TTGGGTTC | 2456. | AGG | 14 | 0.5925 |
| | Tregs | | | 032682.5 | 000003.12 | | | GACTTCAC | | TGTAGACT | | | | |
| | | | | | | | | ATGC | | TCACATGC | | | | |
| | | | | | | | | | | AGGTGG | | | | |
| STAT5A | IL2RA | IL2RA low | 6776 | NM_ | NC_ | 42292035 | sense | ACATTCTG | 2313. | CGGCACAT | 2457. | AGG | 5 | 0.7341 |
| | Tregs | | | 003152.3 | 000017.11 | | | TACAATGA | | TCTGTACA | | | | |
| | | | | | | | | ACAG | | ATGAACA | | | | |
| | | | | | | | | | | GAGGCTG | | | | |
| STAT5A | IL2RA | ILZRA low | 6776 | NM_ | NC_ | 42304559 | sense | ATCAAGCG | 2314. | GAGGATC | 2458. | GGG | 12 | 0.6531 |
| | Tregs | | | 003152.3 | 000017.11 | | | TGCTGACC | | AAGCGTG | | | | |
| | | | | | | | | GGCG | | CTGACCG | | | | |
| | | | | | | | | | | GCGGGGT | | | | |
| | | | | | | | | | | GC | | | | |
| STAT5A | IL2RA | IL2RA low | 6776 | NM_ | NC_ | 42305662 | sense | CAGCCAG | 2315. | ACGGCAG | 2459. | CGG | 13 | 0.6255 |
| | Tregs | | | 003152.3 | 000017.11 | | | GACCACAA | | CCAGGACC | | | | |
| | | | | | | | | TGCCA | | ACAATGCC | | | | |
| | | | | | | | | | | ACGGCTA | | | | |
| STAT5A | IL2RA | IL2RA low | 6776 | NM_ | NC_ | 42301385 | sense | CGTGCACA | 2316. | TGAACGT | 2460. | AGG | 10 | 0.5812 |
| | Tregs | | | 003152.3 | 000017.11 | | | TGAATCCC | | GCACATGA | | | | |
| | | | | | | | | CCCC | | ATCCCCCC | | | | |
| | | | | | | | | | | CAGGTGA | | | | |
| IL2RA | IL2RA Teffs | IL2RA low | 3559 | NM_ | NC_ | 6021673 | sense | CTGCAGG | 2317. | GTCACTGC | 2461. | GGG | 4 | 0.5815 |
| | | | | 000417.2 | 000010.11 | | | GAACCTCC | | AGGGAAC | | | | |
| | | | | | | | | ACCAT | | CTCCACCA | | | | |
| | | | | | | | | | | TGGGAAA | | | | |
| IL2RA | IL2RA Teffs | IL2RA low | 3559 | NM_ | NC_ | 6021582 | sense | GGATACA | 2318. | CCAGGGA | 2462. | AGG | 4 | 0.7695 |
| | | | | 000417.2 | 000010.11 | | | GGGCTCTA | | TACAGGG | | | | |
| | | | | | | | | CACAG | | CTCTACAC | | | | |
| | | | | | | | | | | AGAGGTC | | | | |
| | | | | | | | | | | C | | | | |
| IL2RA | IL2RA Teffs | IL2RA low | 3559 | NM_ | NC_ | 6025992 | antisense | TGGCTTTG | 2319. | GCCATGG | 2463. | GGG | 2 | 0.6265 |
| | | | | 000417.2 | 000010.11 | | | AATGTGG | | CTTTGAAT | | | | |
| | | | | | | | | CGTGT | | GTGGCGT | | | | |
| | | | | | | | | | | GTGGGAT | | | | |
| | | | | | | | | | | C | | | | |
| IL2RA | IL2RA Teffs | IL2RA low | 3559 | NM_ | NC_ | 6024349 | antisense | TTGTTTCG | 2320. | TCACTTGT | 2464. | TGG | 3 | 0.6476 |
| | | | | 000417.2 | 000010.11 | | | TTGTGTTC | | TTCGTTGT | | | | |
| | | | | | | | | CGAG | | GTTCCGAG | | | | |
| | | | | | | | | | | TGGCTA | | | | |
| STAT5B | IL2RA Teffs | IL2RA low | 6777 | NM_ | NC_ | 42216055 | sense | CAGCCAG | 2321. | ATGGCAG | 2465. | CGG | 12 | 0.6375 |
| | | | | 012448.3 | 000017.11 | | | GACAACA | | CCAGGAC | | | | |
| | | | | | | | | ATGCGA | | AACAATGC | | | | |
| | | | | | | | | | | GACGGCC | | | | |
| | | | | | | | | | | A | | | | |
| STAT5B | IL2RA Teffs | IL2RA low | 6777 | NM_ | NC_ | 42227658 | antisense | GTGGCCTT | 2322. | CTGGGTG | 2466. | TGG | 3 | 0.6157 |
| | | | | 012448.3 | 000017.11 | | | AATGTTCT | | GCCTTAAT | | | | |
| | | | | | | | | CCTG | | GTTCTCCT | | | | |
| | | | | | | | | | | GTGGATT | | | | |
| STAT5B | IL2RA Teffs | IL2RA low | 6777 | NM_ | NC_ | 42224822 | antisense | GTTCATTG | 2323. | CTCTGTTC | 2467. | CGG | 4 | 0.6583 |
| | | | | 012448.3 | 000017.11 | | | TACAATAT | | ATTGTACA | | | | |
| | | | | | | | | ATGG | | ATATATGG | | | | |
| | | | | | | | | | | CGGATG | | | | |
| STAT5B | IL2RA Teffs | IL2RA low | 6777 | NM_ | NC_ | 42217252 | sense | TAAGAGG | 2324. | GAATTAAG | 2468. | GGG | 11 | 0.7097 |
| | | | | 012448.3 | 000017.11 | | | TCAGACCG | | AGGTCAG | | | | |
| | | | | | | | | TCGTG | | ACCGTCGT | | | | |
| | | | | | | | | | | GGGGCAG | | | | |
| FOXP1 | IL2RA Teffs | IL2RA low | 27086 | NM_ | NC_ | 71041428 | antisense | AGAGGAG | 2325. | GTGCAGA | 2469 | TGG | 11 | 0.6926 |
| | | | | 032682.5 | 000003.12 | | | GAGACAC | | GGAGGAG | | | | |
| | | | | | | | | ATGTCG | | ACACATGT | | | | |
| | | | | | | | | | | CGTGGTCA | | | | |
| FOXP1 | IL2RA Teffs | IL2RA low | 27086 | NM_ | NC_ | 71015617 | antisense | CATACACC | 2326. | CTTGCATA | 2470. | AGG | 12 | 0.6547 |
| | | | | 032682.5 | 000003.12 | | | ATGTCCAT | | CACCATGT | | | | |
| | | | | | | | | AGAG | | CCATAGAG | | | | |
| | | | | | | | | | | AGGATG | | | | |
| FOXP1 | IL2RA Teffs | IL2RA low | 27086 | NM_ | NC_ | 71046982 | sense | GCCTTCTG | 2327. | CAAGGCCT | 2471 | GGG | 10 | 0.5683 |
| | | | | 032682.5 | 000003.12 | | | ACAATTCA | | TCTGACAA | | | | |
| | | | | | | | | GCCC | | TTCAGCCC | | | | |
| | | | | | | | | | | GGGCAG | | | | |
| FOXP1 | IL2RA Teffs | IL2RA low | 27086 | NM_ | NC_ | 70988031 | antisense | GTTCTGTA | 2328. | TTGGGTTC | 2472. | AGG | 14 | 0.5925 |
| | | | | 032682.5 | 000003.12 | | | GACTTCAC | | TGTAGACT | | | | |
| | | | | | | | | ATGC | | TCACATGC | | | | |
| | | | | | | | | | | AGGTGG | | | | |
| STAT5A | IL2RA Teffs | IL2RA low | 6776 | NM_ | NC_ | 42292035 | sense | ACATTCTG | 2329. | CGGCACAT | 2473. | AGG | 5 | 0.7341 |
| | | | | 003152.3 | 000017.11 | | | TACAATGA | | TCTGTACA | | | | |
| | | | | | | | | ACAG | | ATGAACA | | | | |
| | | | | | | | | | | GAGGCTG | | | | |
| STAT5A | IL2RA Teffs | IL2RA low | 6776 | NM_ | NC_ | 42304559 | sense | ATCAAGCG | 2330. | GAGGATC | 2474. | GGG | 12 | 0.6531 |
| | | | | 003152.3 | 000017.11 | | | TGCTGACC | | AAGCGTG | | | | |
| | | | | | | | | GGCG | | CTGACCG | | | | |
| | | | | | | | | | | GCGGGGT | | | | |
| | | | | | | | | | | GC | | | | |
| STAT5A | IL2RA Teffs | IL2RA low | 6776 | NM_ | NC_ | 42305662 | sense | CAGCCAG | 2331. | ACGGCAG | 2475. | CGG | 13 | 0.6255 |
| | | | | 003152.3 | 000017.11 | | | GACCACAA | | CCAGGACC | | | | |
| | | | | | | | | TGCCA | | ACAATGCC | | | | |
| | | | | | | | | | | ACGGCTA | | | | |
| STAT5A | IL2RA Teffs | IL2RA low | 6776 | NM_ | NC_ | 42301385 | sense | CGTGCACA | 2332. | TGAACGT | 2476. | AGG | 10 | 0.5812 |
| | | | | 003152.3 | 000017.11 | | | TGAATCCC | | GCACATGA | | | | |
| | | | | | | | | CCCC | | ATCCCCCC | | | | |
| | | | | | | | | | | CAGGTGA | | | | |
| GATA3 | IL2RA Teffs | IL2RA low | 2625 | NM_ | NC_ | 8055892 | sense | AGGTACCC | 2333. | GCAGAGG | 2477. | CGG | 2 | 0.6857 |
| | | | | 002051.2 | 000010.11 | | | TCCGACCC | | TACCCTCC | | | | |
| | | | | | | | | ACCA | | GACCCACC | | | | |
| | | | | | | | | | | ACGGTGA | | | | |
| GATA3 | IL2RA Teffs | IL2RA low | 2625 | NM_ | NC_ | 8064014 | sense | CAGGGAG | 2334. | AAGGCAG | 2478 | GGG | 4 | 0.737 |
| | | | | 002051.2 | 000010.11 | | | TGTGTGAA | | GGAGTGT | | | | |
| | | | | | | | | CTGTG | | GTGAACT | | | | |
| | | | | | | | | | | GTGGGGC | | | | |
| | | | | | | | | | | AA | | | | |
| GATA3 | IL2RA Teffs | IL2RA low | 2625 | NM_ | NC_ | 8058740 | antisense | GGAGCTG | 2335. | GTCCGGA | 2479. | AGG | 3 | 0.6273 |
| | | | | 002051.2 | 000010.11 | | | TACTCGGG | | GCTGTACT | | | | |
| | | | | | | | | CACGT | | CGGGCAC | | | | |
| | | | | | | | | | | GTAGGGC | | | | |
| | | | | | | | | | | G | | | | |
| GATA3 | IL2RA Teffs | IL2RA low | 2625 | NM_ | NC_ | 8058432 | sense | TCCAAGAC | 2336. | CTTCTCCA | 2480. | CGG | 3 | 0.7243 |
| | | | | 002051.2 | 000010.11 | | | GTCCATCC | | AGACGTCC | | | | |
| | | | | | | | | ACCA | | ATCCACCA | | | | |
| | | | | | | | | | | CGGCTC | | | | |
| KMT2A | IL2RA Teffs | IL2RA low | 4297 | NM_ | NC_ | 1.19E+08 | antisense | AAGATCA | 2337. | ATTCAAGA | 2481. | TGG | 27 | 0.7172 |
| | | | | 005933.3 | 000011.10 | | | GTAGCGG | | TCAGTAGC | | | | |
| | | | | | | | | TCCCGG | | GGTCCCG | | | | |
| | | | | | | | | | | GTGGTGG | | | | |
| KMT2A | IL2RA Teffs | ILZRA low | 4297 | NM_ | NC_ | 1.18E+08 | sense | AGAAAGG | 2338. | GTAAAGA | 2482. | CGG | 5 | 0.6636 |
| | | | | 005933.3 | 000011.10 | | | ACGTCGAT | | AAGGACG | | | | |
| | | | | | | | | CGAGG | | TCGATCGA | | | | |
| | | | | | | | | | | GGCGGTG | | | | |
| | | | | | | | | | | T | | | | |
| KMT2A | IL2RA Teffs | IL2RA low | 4297 | NM_ | NC_ | 1.18E+08 | antisense | AGGGGTC | 2339. | GCCGAGG | 2483. | AGG | 3 | 0.757 |
| | | | | 005933.3 | 000011.10 | | | TTAATGAT | | GGTCTTAA | | | | |
| | | | | | | | | CCGCG | | TGATCCGC | | | | |
| | | | | | | | | | | GAGGAGA | | | | |
| KMT2A | IL2RA Teffs | IL2RA low | 4297 | NM_ | NC_ | 1.18E+08 | sense | TTGACCAT | 2340 | TCACTTGA | 2484. | TGG | 19 | 0.7229 |
| | | | | 005933.3 | 000011.10 | | | AATTATGC | | CCATAATT | | | | |
| | | | | | | | | TCAG | | ATGCTCAG | | | | |
| | | | | | | | | | | TGGCAG | | | | |
| PTEN | IL2RA Teffs | ILZRA low | 5728 | NM_ | NC_ | 87961027 | sense | AGAGCGT | 2341. | GTATAGA | 2485. | AGG | 8 | 0.7179 |
| | | | | 001304718.1 | 000010.11 | | | GCAGATA | | GCGTGCA | | | | |
| | | | | | | | | ATGACA | | GATAATGA | | | | |
| | | | | | | | | | | CAAGGAA | | | | |
| | | | | | | | | | | T | | | | |
| PTEN | IL2RA Teffs | IL2RA low | 5728 | NM_ | NC_ | 87957861 | antisense | AGCTGGC | 2342. | CTTTAGCT | 2486. | AGG | 7 | 0.6493 |
| | | | | 001304718.1 | 000010.11 | | | AGACCACA | | GGCAGAC | | | | |
| | | | | | | | | AACTG | | CACAAACT | | | | |
| | | | | | | | | | | GAGGATC | | | | |
| PTEN | IL2RA Teffs | IL2RA low | 5728 | NM_ | NC_ | 87960940 | sense | ATTCTTCA | 2343. | ATACATTC | 2487 | AGG | 8 | 0.6697 |
| | | | | 001304718.1 | 000010.11 | | | TACCAGGA | | TTCATACC | | | | |
| | | | | | | | | CCAG | | AGGACCA | | | | |
| | | | | | | | | | | GAGGAAA | | | | |
| PTEN | IL2RA Teffs | IL2RA low | 5728 | NM_ | NC_ | 87957915 | sense | CCAATTCA | 2344. | TCCTCCAA | 2488. | CGG | 7 | 0.6752 |
| | | | | 001304718.1 | 000010.11 | | | GGACCCAC | | TTCAGGAC | | | | |
| | | | | | | | | ACGA | | CCACACGA | | | | |
| | | | | | | | | | | CGGGAA | | | | |
| RELA | IL2RA Teffs | IL2RA low | 5970 | NM_ | NC_ | 65659757 | sense | ACTACGAC | 2345. | GGGGACT | 2489. | CGG | 6 | 0.7259 |
| | | | | 001243984.1 | 000011.10 | | | CTGAATGC | | ACGACCTG | | | | |
| | | | | | | | | TGTG | | AATGCTGT | | | | |
| | | | | | | | | | | GCGGCTC | | | | |
| RELA | IL2RA Teffs | IL2RA low | 5970 | NM_ | NC_ | 65662009 | sense | GCTTCCGC | 2346. | ATGCGCTT | 2490. | GGG | 3 | 0.7137 |
| | | | | 001243984.1 | 000011.10 | | | TACAAGTG | | CCGCTACA | | | | |
| | | | | | | | | CGAG | | AGTGCGA | | | | |
| | | | | | | | | | | GGGGCGC | | | | |
| RELA | IL2RA Teffs | IL2RA low | 5970 | NM_ | NC_ | 65658759 | antisense | GGAAGAT | 2347. | AGTAGGA | 2491. | AGG | 7 | 0.7554 |
| | | | | 001243984.1 | 000011.10 | | | CTCATCCC | | AGATCTCA | | | | |
| | | | | | | | | CACCG | | TCCCCACC | | | | |
| | | | | | | | | | | GAGGCAG | | | | |
| RELA | IL2RA Teffs | IL2RA low | 5970 | NM_ | NC_ | 65661818 | sense | TCAATGGC | 2348. | CAGATCAA | 2492. | GGG | 4 | 0.7164 |
| | | | | 001243984.1 | 000011.10 | | | TACACAGG | | TGGCTACA | | | | |
| | | | | | | | | ACCA | | CAGGACC | | | | |
| | | | | | | | | | | AGGGACA | | | | |
| ETS1 | IL2RA Teffs | IL2RA low | 2113 | NM_ | NC_ | 1.28E+08 | antisense | CTTACTAA | 2349. | TGAACTTA | 2493. | AGG | 4 | 0.6808 |
| | | | | 005238.3 | 000011.10 | | | TGAAGTAA | | CTAATGAA | | | | |
| | | | | | | | | TCCG | | GTAATCCG | | | | |
| | | | | | | | | | | AGGTAT | | | | |
| ETS1 | IL2RA Teffs | IL2RA low | 2113 | NM_ | NC_ | 1.28E+08 | antisense | GAGAAAG | 2350. | GCTCGAG | 2494. | GGG | 3 | 0.6487 |
| | | | | 005238.3 | 000011.10 | | | CAGTCTTT | | AAAGCAG | | | | |
| | | | | | | | | ACCCA | | TCTTTACC | | | | |
| | | | | | | | | | | CAGGGCG | | | | |
| | | | | | | | | | | C | | | | |
| ETS1 | IL2RA Teffs | IL2RA low | 2113 | NM_ | NC_ | 1.28E+08 | antisense | GGTCTCG | 2351. | AGAGGGT | 2495. | GGG | 5 | 0.7649 |
| | | | | 005238.3 | 000011.10 | | | GAGAATG | | CTCGGAG | | | | |
| | | | | | | | | ACCGAG | | AATGACCG | | | | |
| | | | | | | | | | | AGGGGTA | | | | |
| | | | | | | | | | | G | | | | |
| ETS1 | IL2RA Teffs | IL2RA low | 2113 | NM_ | NC_ | 1.28E+08 | sense | TGCATGG | 2352. | CATGTGCA | 2496. | TGG | 5 | 0.6503 |
| | | | | 005238.3 | 000011.10 | | | GGAGGAC | | TGGGGAG | | | | |
| | | | | | | | | CAGTCG | | GACCAGTC | | | | |
| | | | | | | | | | | GTGGTAG | | | | |
| RBPJ | IL2RA Teffs | IL2RA low | 3516 | NM_ | NC_ | 26415547 | sense | AAAGAAC | 2353. | AAAAAAA | 2497. | TGG | 5 | 0.6336 |
| | | | | 005349.3 | 000004.12 | | | AAATGGA | | GAACAAAT | | | | |
| | | | | | | | | ACGCGA | | GGAACGC | | | | |
| | | | | | | | | | | GATGGTT | | | | |
| | | | | | | | | | | G | | | | |
| RBPJ | IL2RA Teffs | ILZRA low | 3516 | NM_ | NC_ | 26386378 | antisense | CACCTAGT | 2354. | TACTCACC | 2498. | TGG | 3 | 0.6435 |
| | | | | 005349.3 | 000004.12 | | | AAGTCGTT | | TAGTAAGT | | | | |
| | | | | | | | | TAGG | | CGTTTAGG | | | | |
| | | | | | | | | | | TGGAGG | | | | |
| RBPJ | IL2RA Teffs | IL2RA low | 3516 | NM_ | NC_ | 26424454 | sense | CATGCCAG | 2355. | TTTTCATG | 2499. | GGG | 7 | 0.6844 |
| | | | | 005349.3 | 000004.12 | | | TTCACAGC | | CCAGTTCA | | | | |
| | | | | | | | | AGTG | | CAGCAGT | | | | |
| | | | | | | | | | | GGGGAGC | | | | |
| RBPI | IL2RA Teffs | IL2RA low | 3516 | NM_ | NC_ | 26424363 | sense | CATTGCCT | 2356. | TATGCATT | 2500. | TGG | 7 | 0.65 |
| | | | | 005349.3 | 000004.12 | | | CAGGAAC | | GCCTCAG | | | | |
| | | | | | | | | AAAGG | | GAACAAA | | | | |
| | | | | | | | | | | GGTGGCT | | | | |
| | | | | | | | | | | C | | | | |
| RXRB | IL2RA Teffs | IL2RA low | 6257 | NM_ | NC_ | 33198326 | sense | ACGGCTAT | 2357. | GCAAACG | 2501. | GGG | 3 | 0.7124 |
| | | | | 021976.4 | 000006.12 | | | GTGCAATC | | GCTATGTG | | | | |
| | | | | | | | | TGCG | | CAATCTGC | | | | |
| | | | | | | | | | | GGGGACA | | | | |
| RXRB | IL2RA Teffs | IL2RA low | 6257 | NM_ | NC_ | 33200341 | sense | GCCCTGGC | 2358. | GACGGCC | 2502. | CGG | 1 | 0.6547 |
| | | | | 021976.4 | 000006.12 | | | TGGATCCC | | CTGGCTG | | | | |
| | | | | | | | | GCAG | | GATCCCGC | | | | |
| | | | | | | | | | | AGCGGCG | | | | |
| | | | | | | | | | | G | | | | |
| RXRB | IL2RA Teffs | IL2RA low | 6257 | NM_ | NC_ | 33197840 | sense | GGACAAC | 2359. | GCCGGGA | 2503. | TGG | 4 | 0.7879 |
| | | | | 021976.4 | 000006.12 | | | AAAGACT | | CAACAAA | | | | |
| | | | | | | | | GCACAG | | GACTGCAC | | | | |
| | | | | | | | | | | AGTGGAC | | | | |
| | | | | | | | | | | A | | | | |
| RXRB | IL2RA Teffs | IL2RA low | 6257 | NM_ | NC_ | 33198421 | antisense | GTGGCTTC | 2360 | ACTGGTG | 2504 | GGG | 3 | 0.6579 |
| | | | | 021976.4 | 000006.12 | | | ACATCTTC | | GCTTCACA | | | | |
| | | | | | | | | AGGG | | TCTTCAGG | | | | |
| | | | | | | | | | | GGGGCCA | | | | |
| ZNF148 | IL2RA Teffs | IL2RA low | 7707 | NM_ | NC_ | 1.25E+08 | sense | AGATCGA | 2361. | TTCAAGAT | 2505. | AGG | 4 | 0.5525 |
| | | | | 021964.2 | 000003.12 | | | AGTATGCC | | CGAAGTAT | | | | |
| | | | | | | | | TCACC | | GCCTCACC | | | | |
| | | | | | | | | | | AGGAGA | | | | |
| ZNF148 | IL2RA Teffs | IL2RA low | 7707 | NM_ | NC_ | 1.25E+08 | antisense | AGTGCATA | 2362. | ATTAAGTG | 2506. | AGG | 4 | 0.6259 |
| | | | | 021964.2 | 000003.12 | | | CTGTAGTC | | CATACTGT | | | | |
| | | | | | | | | CTTG | | AGTCCTTG | | | | |
| | | | | | | | | | | AGGAAG | | | | |
| ZNF148 | IL2RA Teffs | IL2RA low | 7707 | NM_ | NC_ | 1.25E+08 | antisense | GAGCCCCC | 2363. | ATGCGAG | 2507. | TGG | 9 | 0.6379 |
| | | | | 021964.2 | 000003.12 | | | AACTGACG | | CCCCCAAC | | | | |
| | | | | | | | | AATG | | TGACGAAT | | | | |
| | | | | | | | | | | GTGGCAT | | | | |
| ZNF148 | IL2RA Teffs | IL2RA low | 7707 | NM_ | NC_ | 1.25E+08 | antisense | TAATTAGT | 2364. | ATCATAAT | 2508. | AGG | 9 | 0.6151 |
| | | | | 021964.2 | 000003.12 | | | ACTACTAT | | TAGTACTA | | | | |
| | | | | | | | | GCAC | | CTATGCAC | | | | |
| | | | | | | | | | | AGGTTT | | | | |
| VPS52 | IL2RA Teffs | IL2RA low | 6293 | NM_ | NC_ | 33267957 | sense | CAATGAAC | 2365. | TGGGCAA | 2509 | AGG | 8 | 0.6103 |
| | | | | 001289174.1 | 000006.12 | | | GAGCAAC | | TGAACGA | | | | |
| | | | | | | | | AGCAA | | GCAACAG | | | | |
| | | | | | | | | | | CAAAGGA | | | | |
| | | | | | | | | | | GA | | | | |
| VPS52 | IL2RA Teffs | IL2RA low | 6293 | NM_ | NC_ | 33266562 | sense | CCGTACAC | 2366. | TGGGCCG | 2510. | TGG | 11 | 0.6309 |
| | | | | 001289174.1 | 000006.12 | | | TCAGCATG | | TACACTCA | | | | |
| | | | | | | | | ACCC | | GCATGACC | | | | |
| | | | | | | | | | | CTGGTAA | | | | |
| VPS52 | IL2RA Teffs | IL2RA low | 6293 | NM_ | NC_ | 33269070 | sense | GAAATCGC | 2367. | CTTCGAAA | 2511. | GGG | 5 | 0.7039 |
| | | | | 001289174.1 | 000006.12 | | | CAGGCAG | | TCGCCAG | | | | |
| | | | | | | | | TTCGG | | GCAGTTCG | | | | |
| | | | | | | | | | | GGGGAAA | | | | |
| VPS52 | IL2RA Teffs | ILZRA low | 6293 | NM_ | NC_ | 33264461 | antisense | TCCAGGAT | 2368. | CATCTCCA | 2512. | TGG | 13 | 0.6852 |
| | | | | 001289174.1 | 000006.12 | | | CAGTTCAA | | GGATCAG | | | | |
| | | | | | | | | ACCG | | TTCAAACC | | | | |
| | | | | | | | | | | GTGGCCA | | | | |
| TFAP4 | IL2RA Teffs | IL2RA low | 7023 | NM_ | NC_ | 4262329 | sense | ACAGCTCA | 2369. | ACACACAG | 2513. | AGG | 3 | 0.5694 |
| | | | | 003223.2 | 000016.10 | | | AGCGCTTC | | CTCAAGCG | | | | |
| | | | | | | | | ATCC | | CTTCATCC | | | | |
| | | | | | | | | | | AGGTGC | | | | |
| TFAP4 | IL2RA Teffs | IL2RA low | 7023 | NM_ | NC_ | 4261877 | sense | AGGCTCCC | 2370. | GCATAGG | 2514. | AGG | 4 | 0.6975 |
| | | | | 003223.2 | 000016.10 | | | CGGACATC | | CTCCCCGG | | | | |
| | | | | | | | | TGGG | | ACATCTGG | | | | |
| | | | | | | | | | | GAGGACG | | | | |
| TFAP4 | IL2RA Teffs | IL2RA low | 7023 | NM_ | NC_ | 4262671 | sense | CACTAACC | 2371. | ATTCCACT | 2515. | CGG | 2 | 0.6468 |
| | | | | 003223.2 | 000016.10 | | | CCCGAGAC | | AACCCCCG | | | | |
| | | | | | | | | TCAG | | AGACTCAG | | | | |
| | | | | | | | | | | CGGGAC | | | | |
| TFAP4 | IL2RA Teffs | IL2RA low | 7023 | NM_ | NC_ | 4262597 | sense | CGCATGCA | 2372. | GAGACGC | 2516. | GGG | 2 | 0.634 |
| | | | | 003223.2 | 000016.10 | | | GAGCATCA | | ATGCAGA | | | | |
| | | | | | | | | ACGC | | GCATCAAC | | | | |
| | | | | | | | | | | GCGGGAT | | | | |
| | | | | | | | | | | T | | | | |
| IKZF3 | IL2RA Teffs | IL2RA low | 22806 | NM_ | NC_ | 39792732 | sense | AAGATGA | 2373. | TGGAAAG | 2517. | TGG | 4 | 0.7182 |
| | | | | 012481.4 | 000017.11 | | | ACTGCGAT | | ATGAACTG | | | | |
| | | | | | | | | GTGTG | | CGATGTGT | | | | |
| | | | | | | | | | | GTGGATT | | | | |
| IKZF3 | IL2RA Teffs | IL2RA low | 22806 | NM_ | NC_ | 39788318 | sense | CAAGCAG | 2374. | GTTACAAG | 2518. | AGG | 6 | 0.6635 |
| | | | | 012481.4 | 000017.11 | | | AGAAGTTC | | CAGAGAA | | | | |
| | | | | | | | | CCTTG | | GTTCCCTT | | | | |
| | | | | | | | | | | GAGGAGC | | | | |
| IKZF3 | IL2RA Teffs | IL2RA low | 22806 | NM_ | NC_ | 39766413 | sense | GCTCATAC | 2375 | GTGAGCTC | 2519 | TGG | 8 | 0.6101 |
| | | | | 012481.4 | 000017.11 | | | AGACCCGC | | ATACAGAC | | | | |
| | | | | | | | | ATGA | | CCGCATGA | | | | |
| | | | | | | | | | | TGGACC | | | | |
| IKZF3 | IL2RA Teffs | IL2RA low | 22806 | NM_ | NC_ | 39777693 | sense | GGACAGA | 2376. | TACTGGAC | 2520. | TGG | 7 | 0.7336 |
| | | | | 012481.4 | 000017.11 | | | TTAGCAAG | | AGATTAGC | | | | |
| | | | | | | | | CAATG | | AAGCAAT | | | | |
| | | | | | | | | | | GTGGCAA | | | | |
| SRF | IL2RA Teffs | IL2RA low | 6722 | NM_ | NC_ | 43175724 | antisense | AGGTTGG | 2377. | CGGCAGG | 2521. | CGG | 3 | 0.6646 |
| | | | | 003131.3 | 000006.12 | | | TGACTGTG | | TTGGTGAC | | | | |
| | | | | | | | | AACGC | | TGTGAAC | | | | |
| | | | | | | | | | | GCCGGCTT | | | | |
| SRF | IL2RA Teffs | ILZRA low | 6722 | NM_ | NC_ | 43172119 | sense | AGTTCATC | 2378. | ATGGAGTT | 2522. | CGG | 1 | 0.7054 |
| | | | | 003131.3 | 000006.12 | | | GACAACA | | CATCGACA | | | | |
| | | | | | | | | AGCTG | | ACAAGCTG | | | | |
| | | | | | | | | | | CGGCGC | | | | |
| SRE | IL2RA Teffs | IL2RA low | 6722 | NM_ | NC_ | 43175844 | antisense | GGGCTGA | 2379. | ACTGGGG | 2523. | TGG | 3 | 0.65 |
| | | | | 003131.3 | 000006.12 | | | CACTAGCA | | CTGACACT | | | | |
| | | | | | | | | GACAC | | AGCAGAC | | | | |
| | | | | | | | | | | ACTGGTGC | | | | |
| SRE | IL2RA Teffs | IL2RA low | 6722 | NM_ | NC_ | 43174015 | antisense | TCTGTTGT | 2380. | CTGGTCTG | 2524. | GGG | 2 | 0.605 |
| | | | | 003131.3 | 000006.12 | | | GGGGTCT | | TTGTGGG | | | | |
| | | | | | | | | GAACG | | GTCTGAAC | | | | |
| | | | | | | | | | | GGGGTGG | | | | |
| CEBPZ | IL2RA Teffs | IL2RA low | 10153 | NM_ | NC_ | 37223251 | antisense | AAAGCTCC | 2381. | ATATAAAG | 2525. | TGG | 3 | 0.6404 |
| | | | | 005760.2 | 000002.12 | | | ACATATAA | | CTCCACAT | | | | |
| | | | | | | | | ATGG | | ATAAATGG | | | | |
| | | | | | | | | | | TGGCAT | | | | |
| CEBPZ | IL2RA Teffs | IL2RA low | 10153 | NM_ | NC_ | 37228088 | antisense | ACAAAGC | 2382. | TGTTACAA | 2526. | CGG | 2 | 0.63 |
| | | | | 000576.2 | 000002.12 | | | AGCTCATG | | AGCAGCTC | | | | |
| | | | | | | | | AGCCA | | ATGAGCCA | | | | |
| | | | | | | | | | | CGGTAA | | | | |
| CEBPZ | IL2RA Teffs | ILZRA low | 10153 | NM_ | NC_ | 37227623 | antisense | CAACATTA | 2383. | AAAGCAA | 2527. | TGG | 2 | 0.6374 |
| | | | | 005760.2 | 000002.12 | | | AAGCCTG | | CATTAAAG | | | | |
| | | | | | | | | GACAC | | CCTGGACA | | | | |
| | | | | | | | | | | CTGGTAT | | | | |
| CEBPZ | IL2RA Teffs | IL2RA low | 10153 | NM_ | NC_ | 37228473 | sense | TGAAGGC | 2384. | TGGATGA | 2528. | GGG | 2 | 0.7347 |
| | | | | 005760.2 | 000002.12 | | | AATTGTGT | | AGGCAATT | | | | |
| | | | | | | | | CATCG | | GTGTCATC | | | | |
| | | | | | | | | | | GGGGACA | | | | |
| BATF | IL2RA Teffs | IL2RA low | 10538 | NM_ | NC_ | 75546499 | sense | ACAGAAC | 2385. | AGAAACA | 2529. | AGG | 3 | 0.599 |
| | | | | 006399.3 | 000014.9 | | | GCGGCTCT | | GAACGCG | | | | |
| | | | | | | | | ACGCA | | GCTCTACG | | | | |
| | | | | | | | | | | CAAGGAG | | | | |
| | | | | | | | | | | A | | | | |
| BATF | IL2RA Teffs | IL2RA low | 10538 | NM_ | NC_ | 75522739 | antisense | AGGACTCT | 2386. | AAGGAGG | 2530. | GGG | 1 | 0.6137 |
| | | | | 006399.3 | 000014.9 | | | ACCTGTTT | | ACTCTACC | | | | |
| | | | | | | | | GCCA | | TGTTTGCC | | | | |
| | | | | | | | | | | AGGGGGA | | | | |
| BATF | IL2RA Teffs | IL2RA low | 10538 | NM_ | NC_ | 75525114 | sense | ATGTGAG | 2387. | GATGATGT | 2531. | AGG | 2 | 0.5377 |
| | | | | 006399.3 | 000014.9 | | | AAGAGTTC | | GAGAAGA | | | | |
| | | | | | | | | AGAGG | | GTTCAGA | | | | |
| | | | | | | | | | | GGAGGGA | | | | |
| | | | | | | | | | | G | | | | |
| BATF | IL2RA Teffs | IL2RA low | 10538 | NM_ | NC_ | 75546520 | sense | GGAGATC | 2388. | GCAAGGA | 2532. | AGG | 3 | 0.7037 |
| | | | | 006399.3 | 000014.9 | | | AAGCAGCT | | GATCAAGC | | | | |
| | | | | | | | | CACAG | | AGCTCACA | | | | |
| | | | | | | | | | | GAGGAAC | | | | |
| CIC | IL2RA Teffs | IL2RA low | 23152 | NM_ | NC_ | 42291060 | sense | ACTGTCAC | 2389. | TGCCACTG | 2533. | GGG | 10 | 0.6591 |
| | | | | 015125.4 | 000019.10 | | | TAACCTAC | | TCACTAAC | | | | |
| | | | | | | | | TGGT | | CTACTGGT | | | | |
| | | | | | | | | | | GGGCAC | | | | |
| CIC | IL2RA Teffs | IL2RA low | 23152 | NM_ | NC_ | 42292311 | antisense | CCCGCCCG | 2390. | CGTGCCCG | 2534 | AGG | 13 | 0.6689 |
| | | | | 015125.4 | 000019.10 | | | CTGACTGC | | CCCGCTGA | | | | |
| | | | | | | | | ACAT | | CTGCACAT | | | | |
| | | | | | | | | | | AGGTGA | | | | |
| CIC | IL2RA Teffs | IL2RA low | 23152 | NM_ | NC_ | 42287372 | sense | CTCTACCG | 2391. | TTGCCTCT | 2535. | CGG | 4 | 0.6842 |
| | | | | 015125.4 | 000019.10 | | | CCCGGAA | | ACCGCCCG | | | | |
| | | | | | | | | AACGT | | GAAAACG | | | | |
| | | | | | | | | | | TCGGACC | | | | |
| CIC | IL2RA Teffs | IL2RA low | 23152 | NM_ | NC_ | 42289198 | antisense | TTGGGCCA | 2392. | GGCTTTGG | 2536. | GGG | 8 | 0.6248 |
| | | | | 015125.4 | 000019.10 | | | GAGTACG | | GCCAGAG | | | | |
| | | | | | | | | ATGCA | | TACGATGC | | | | |
| | | | | | | | | | | AGGGCCA | | | | |
| IKZF1 | IL2RA Teffs | IL2RA low | 10320 | NM_ | NC_ | 50376659 | sense | GAAAATG | 2393. | GAGAGAA | 2537. | GGG | 4 | 0.66 |
| | | | | 006060.5 | 000007.14 | | | AATGGCTC | | AATGAATG | | | | |
| | | | | | | | | CCACA | | GCTCCCAC | | | | |
| | | | | | | | | | | AGGGACC | | | | |
| IKZF1 | IL2RA Teffs | IL2RA low | 10320 | NM_ | NC_ | 50399996 | antisense | GATGGCTT | 2394. | TGTTGATG | 2538. | GGG | 8 | 0.7379 |
| | | | | 006060.5 | 000007.14 | | | GGTCCATC | | GCTTGGTC | | | | |
| | | | | | | | | ACGT | | CATCACGT | | | | |
| | | | | | | | | | | GGGACT | | | | |
| IKZF1 | IL2RA Teffs | IL2RA low | 10320 | NM_ | NC_ | 50382586 | sense | GGGGCCT | 2395. | GTGCGGG | 2539 | GGG | 5 | 0.6196 |
| | | | | 006060.5 | 000007.14 | | | CATTCACC | | GCCTCATT | | | | |
| | | | | | | | | CAGAA | | CACCCAGA | | | | |
| | | | | | | | | | | AGGGCAA | | | | |
| IKZF1 | IL2RA Teffs | IL2RA low | 10320 | NM_ | NC_ | S0327753 | sense | TCCAAGAG | 2396. | AAGCTCCA | 2540. | GGG | 3 | 0.617 |
| | | | | 006060.5 | 000007.14 | | | TGACAGA | | AGAGTGA | | | | |
| | | | | | | | | GTCGT | | CAGAGTC | | | | |
| | | | | | | | | | | GTGGGTA | | | | |
| | | | | | | | | | | A | | | | |
| IRF4 | IL2RA Teffs | IL2RA low | 3662 | NM_ | NC_ | 394977 | sense | CAGACCCG | 2397. | ATCTCAGA | 2541. | AGG | 3 | 0.5822 |
| | | | | 001195286.1 | 000006.12 | | | TACAAAGT | | CCCGTACA | | | | |
| | | | | | | | | GTAC | | AAGTGTAC | | | | |
| | | | | | | | | | | AGGATT | | | | |
| IRF4 | IL2RA Teffs | IL2RA low | 3662 | NM_ | NC_ | 397215 | sense | CCCATGAC | 2398. | ATGTCCCA | 2542. | CGG | 5 | 0.7031 |
| | | | | 001195286.1 | 000006.12 | | | GTTTGGAC | | TGACGTTT | | | | |
| | | | | | | | | CCCG | | GGACCCC | | | | |
| | | | | | | | | | | GCGGCCA | | | | |
| IRF4 | IL2RA Teffs | IL2RA low | 3662 | NM_ | NC_ | 401466 | sense | CTACCGG | 2399. | TGTACTAC | 2543. | AGG | 7 | 0.6428 |
| | | | | 001195286.1 | 000006.12 | | | GAAATCCT | | CGGGAAA | | | | |
| | | | | | | | | CGTGA | | TCCTCGTG | | | | |
| | | | | | | | | | | AAGGAGC | | | | |
| IRF4 | IL2RA Teffs | IL2RA low | 3662 | NM_ | NC_ | 393251 | sense | CTGATCGA | 2400. | GTGGCTG | 2544. | CGG | 2 | 0.6887 |
| | | | | 001195286.1 | 000006.12 | | | CCAGATCG | | ATCGACCA | | | | |
| | | | | | | | | ACAG | | GATCGACA | | | | |
| | | | | | | | | | | GCGGCAA | | | | |
| MBD2 | IL2RA Teffs | ILZRA low | 8932 | NM_ | NC_ | 54224170 | sense | AGCCGGT | 2401. | CGGGAGC | 2545. | GGG | 1 | 0.5949 |
| | | | | 003927.4 | 000018.10 | | | CCCTTTCC | | CGGTCCCT | | | | |
| | | | | | | | | CGTCG | | TTCCCGTC | | | | |
| | | | | | | | | | | GGGGAGC | | | | |
| MBD2 | IL2RA Teffs | IL2RA low | 8932 | NM_ | NC_ | 54205113 | sense | CCTCAGTT | 2402. | CAAGCCTC | 2546. | GGG | 2 | 0.5818 |
| | | | | 003927.4 | 000018.10 | | | GGCAAGG | | AGTTGGC | | | | |
| | | | | | | | | TACCT | | AAGGTACC | | | | |
| | | | | | | | | | | TGGGAAA | | | | |
| MBD2 | IL2RA Teffs | IL2RA low | 8932 | NM_ | NC_ | 54204999 | sense | CCTCTCAA | 2403. | CGATCCTC | 2547. | TGG | 2 | 0.5401 |
| | | | | 003927.4 | 000018.10 | | | TCAAAATA | | TCAATCAA | | | | |
| | | | | | | | | AGGT | | AATAAGGT | | | | |
| | | | | | | | | | | TGGTTA | | | | |
| MBD2 | IL2RA Teffs | IL2RA low | 8932 | NM_ | NC_ | 54224048 | sense | CGAAAATC | 2404. | GATCCGAA | 2548. | TGG | 1 | 0.494 |
| | | | | 003927.4 | 000018.10 | | | TGGGCTA | | AATCTGG | | | | |
| | | | | | | | | AGTGC | | GCTAAGT | | | | |
| | | | | | | | | | | GCTGGCA | | | | |
| | | | | | | | | | | A | | | | |
| JAK3 | IL2RA Teffs | IL2RA low | 3718 | NM_ | NC_ | 17835098 | antisense | ACTCTCCA | 2405. | ACTTACTO | 2549 | CGG | 15 | 0.7301 |
| | | | | 000215.3 | 000019.10 | | | GGCTTAAC | | TCCAGGCT | | | | |
| | | | | | | | | ACAG | | TAACACAG | | | | |
| | | | | | | | | | | CGGGGC | | | | |
| JAK3 | IL2RA Teffs | ILZRA low | 3718 | NM_ | NC_ | 17839577 | antisense | AGCTCTCG | 2406. | CAGGAGC | 2550. | GGG | 10 | 0.7109 |
| | | | | 000215.3 | 000019.10 | | | AAGACTGC | | TCTCGAAG | | | | |
| | | | | | | | | TGTG | | ACTGCTGT | | | | |
| | | | | | | | | | | GGGGTCG | | | | |
| JAK3 | IL2RA Teffs | IL2RA low | 3718 | NM_ | NC_ | 17836043 | antisense | GTGTACAA | 2407. | CCAGGTGT | 2551. | TGG | 14 | 0.6764 |
| | | | | 000215.3 | 000019.10 | | | ATTCCTGC | | ACAAATTC | | | | |
| | | | | | | | | ACCA | | CTGCACCA | | | | |
| | | | | | | | | | | TGGTGC | | | | |
| JAK3 | IL2RA Teffs | IL2RA low | 3718 | NM_ | NC_ | 17842538 | sense | TGACGCG | 2408. | TTCGTGAC | 2552. | AGG | 6 | 0.6476 |
| | | | | 000215.3 | 000019.10 | | | GAGGCGT | | GCGGAGG | | | | |
| | | | | | | | | ATTCGG | | CGTATTCG | | | | |
| | | | | | | | | | | GAGGACG | | | | |
| BCL6 | IL2RA Teffs | IL2RA low | 604 | NM_ | NC_ | 1.88E+08 | sense | AAGTGATA | 2409. | CACGAAGT | 2553. | TGG | 5 | 0.8035 |
| | | | | 001706.4 | 000003.12 | | | TGCACTAC | | GATATGCA | | | | |
| | | | | | | | | AGTG | | CTACAGTG | | | | |
| | | | | | | | | | | TGGCTG | | | | |
| BCL6 | IL2RA Teffs | IL2RA low | 604 | NM_ | NC_ | 1.88E+08 | sense | CAAGACAT | 2410. | GCCCCAAG | 2554. | GGG | 5 | 0.6458 |
| | | | | 001706.4 | 000003.12 | | | CATGGCCT | | ACATCATG | | | | |
| | | | | | | | | ATCG | | GCCTATCG | | | | |
| | | | | | | | | | | GGGTCG | | | | |
| BCL6 | IL2RA Teffs | ILZRA low | 604 | NM_ | NC_ | 1.88E+08 | antisense | CATCTGCA | 2411. | GCTCCATC | 2555. | TGG | 4 | 0.6878 |
| | | | | 001706.4 | 000003.12 | | | GGTACATA | | TGCAGGT | | | | |
| | | | | | | | | GCCG | | ACATAGCC | | | | |
| | | | | | | | | | | GTGGCCA | | | | |
| BCL6 | IL2RA Teffs | IL2RA low | 604 | NM_ | NC_ | 1.88E+08 | antisense | TCCCTCAC | 2412. | CAGATCCC | 2556. | AGG | 3 | 0.6413 |
| | | | | 001706.4 | 000003.12 | | | CTGCAGG | | TCACCTGC | | | | |
| | | | | | | | | CCATG | | AGGCCAT | | | | |
| | | | | | | | | | | GAGGACC | | | | |
| ZNF236 | IL2RA Teffs | IL2RA low | 7776 | NM_ | NC_ | 76919836 | sense | ATCACGGA | 2413. | ATGCATCA | 2557. | AGG | 20 | 0.6507 |
| | | | | 007345.3 | 000018.10 | | | AGTCTCGT | | CGGAAGT | | | | |
| | | | | | | | | CCTG | | CTCGTCCT | | | | |
| | | | | | | | | | | GAGGTCA | | | | |
| ZNF236 | IL2RA Teffs | IL2RA low | 7776 | NM_ | NC_ | 76913812 | sense | GCATGTGC | 2414. | AGCAGCAT | 2558. | GGG | 18 | 0.7309 |
| | | | | 007345.3 | 000018.10 | | | GGTCGCA | | GTGCGGT | | | | |
| | | | | | | | | CACCG | | CGCACACC | | | | |
| | | | | | | | | | | GGGGAAA | | | | |
| ZNF236 | IL2RA Teffs | IL2RA low | 7776 | NM_ | NC_ | 76905317 | sense | GGCAGCTT | 2415. | TGGTGGC | 2559 | GGG | 13 | 0.6112 |
| | | | | 007345.3 | 000018.10 | | | ACGGCGA | | AGCTTACG | | | | |
| | | | | | | | | CACAT | | GCGACAC | | | | |
| | | | | | | | | | | ATGGGTAT | | | | |
| ZNF236 | IL2RA Teffs | IL2RA low | 7776 | NM_ | NC_ | 76910097 | antisense | TGGTCTAC | 2416. | AAACTGGT | 2560. | AGG | 15 | 0.6536 |
| | | | | 007345.3 | 000018.10 | | | GTGCCCTC | | CTACGTGC | | | | |
| | | | | | | | | GCAG | | CCTCGCAG | | | | |
| | | | | | | | | | | AGGGTC | | | | |
| TCF3 | IL2RA Teffs | IL2RA low | 6929 | NM_ | NC_ | 1622055 | sense | CACCAGCA | 2417. | CCTGCACC | 2561. | AGG | 10 | 0.6193 |
| | | | | 003200.3 | 000019.10 | | | CGAGCGT | | AGCACGA | | | | |
| | | | | | | | | ATGGT | | GCGTATG | | | | |
| | | | | | | | | | | GTAGGAC | | | | |
| | | | | | | | | | | C | | | | |
| TCF3 | IL2RA Teffs | IL2RA low | 6929 | NM_ | NC_ | 1622322 | sense | CTATCCCG | 2418. | GCACCTAT | 2562. | TGG | 9 | 0.6605 |
| | | | | 003200.3 | 000019.10 | | | CCCCCTTC | | CCCGCCCC | | | | |
| | | | | | | | | TACG | | CTTCTACG | | | | |
| | | | | | | | | | | TGGCAG | | | | |
| TCF3 | IL2RA Teffs | IL2RA low | 6929 | NM_ | NC_ | 1619821 | antisense | GCTGGGC | 2419. | CGTAGCTG | 2563. | GGG | 14 | 0.6527 |
| | | | | 003200.3 | 000019.10 | | | GATAAGG | | GGCGATA | | | | |
| | | | | | | | | CACCGG | | AGGCACC | | | | |
| | | | | | | | | | | GGGGGCT | | | | |
| | | | | | | | | | | C | | | | |
| TCF3 | IL2RA Teffs | IL2RA low | 6929 | NM_ | NC_ | 1621034 | antisense | GTTATTGC | 2420 | AGAAGTTA | 2564. | GGG | 13 | 0.6808 |
| | | | | 003200.3 | 000019.10 | | | TTGAGTGA | | TTGCTTGA | | | | |
| | | | | | | | | TCCG | | GTGATCCG | | | | |
| | | | | | | | | | | GGGAGT | | | | |
| YY1 | IL2RA Teffs | IL2RA low | 7528 | NM_ | NC_ | 1E+08 | sense | AGATATTG | 2421. | AAAAAGA | 2565. | TGG | 2 | 0.667 |
| | | | | 003403.4 | 000014.9 | | | ACCATGAG | | TATTGACC | | | | |
| | | | | | | | | ACAG | | ATGAGAC | | | | |
| | | | | | | | | | | AGTGGTT | | | | |
| | | | | | | | | | | G | | | | |
| YY1 | IL2RA Teffs | IL2RA low | 7528 | NM_ | NC_ | 1E+08 | sense | GGAGACC | 2422. | CGGTGGA | 2566. | TGG | 1 | 0.7975 |
| | | | | 003403.4 | 000014.9 | | | ATCGAGAC | | GACCATCG | | | | |
| | | | | | | | | CACAG | | AGACCACA | | | | |
| | | | | | | | | | | GTGGTGG | | | | |
| YY1 | IL2RA Teffs | IL2RA low | 7528 | NM_ | NC_ | 1E+08 | sense | GGTCACC | 2423. | CGCTGGTC | 2567. | AGG | 1 | 0.6314 |
| | | | | 003403.4 | 000014.9 | | | GACGACCC | | ACCGACG | | | | |
| | | | | | | | | GACCC | | ACCCGACC | | | | |
| | | | | | | | | | | CAGGTGC | | | | |
| YY1 | IL2RA Teffs | IL2RA low | 7528 | NM_ | NC_ | 1E+08 | sense | TGAACAAA | 2424. | ACATTGAA | 2568. | TGG | 1 | 0.7093 |
| | | | | 003403.4 | 000014.9 | | | CGCTGGTC | | CAAACGCT | | | | |
| | | | | | | | | ACCG | | GGTCACC | | | | |
| | | | | | | | | | | GTGGCGG | | | | |
| PURA | IL2RA Teffs | IL2RA low | 5813 | NM_ | NC_ | 1.4E+08 | sense | CCTTACTC | 2425. | GCCGCCTT | 2569. | TGG | 1 | 0.6294 |
| | | | | 005859.4 | 000005.10 | | | TCTCCATG | | ACTCTCTC | | | | |
| | | | | | | | | TCAG | | CATGTCAG | | | | |
| | | | | | | | | | | TGGCCG | | | | |
| PURA | IL2RA Teffs | IL2RA low | 5813 | NM_ | NC_ | 1.4E+08 | antisense | GAACTCGA | 2426. | CACGGAA | 2570. | CGG | 1 | 0.6814 |
| | | | | 005859.4 | 000005.10 | | | TGAGCCCC | | CTCGATGA | | | | |
| | | | | | | | | TGCG | | GCCCCTGC | | | | |
| | | | | | | | | | | GCGGGCA | | | | |
| PURA | IL2RA Teffs | IL2RA low | 5813 | NM_ | NC_ | 1.4E+08 | sense | GCTCATCG | 2427. | CCAAGCTC | 2571. | TGG | 1 | 0.6758 |
| | | | | 005859.4 | 000005.10 | | | ACGACTAC | | ATCGACGA | | | | |
| | | | | | | | | GGAG | | CTACGGA | | | | |
| | | | | | | | | | | GTGGAGG | | | | |
| PURA | IL2RA Teffs | IL2RA low | 5813 | NM_ | NC_ | 1.4E+08 | sense | TCCGCCAG | 2428. | CGCATCCG | 2572. | GGG | 1 | 0.6124 |
| | | | | 005859.4 | 000005.10 | | | ACGGTCAA | | CCAGACG | | | | |
| | | | | | | | | CCGG | | GTCAACCG | | | | |
| | | | | | | | | | | GGGGCCT | | | | |

[0088] In some embodiments, inhibition of one or more nuclear factors set forth in Table 1 and/or overexpression of one or more nuclear factors set forth in Table 2 a may increase CTLA4 expression in the T cell. In some embodiments, inhibition of one or more nuclear factors set forth in Table 2, and/or overexpression of one or more nuclear factor set forth in Table 1 may decrease CTLA4 expression in the T cell.

[0089] In some embodiments, the T cell comprises: (a) a genetic modification or a heterologous polynucleotide that inhibits expression of CBFB, MYB, ZNF217, FOXK1, FLI1, FOS, SATB1, IL2 or ATXN7L3, wherein expression of CTLA4 is increased in the T cell relative to expression of CTLA4 in a T cell not comprising the genetic modification or the heterologous polynucleotide that inhibits expression of CBFB, MYB, ZNF217, FOXK1, FLI1, FOS, SATB1, IL2 or ATXN7L3; and/or (b) a heterologous polypeptide that encodes MTF1, RELA, IRF1, BCL11B, STAT3, MED30, MED14, MED11, IKZF3, KMT2A, IKZF1, MED12, TAF5L, PTEN, IRF4, FOXO1, FOXP1 or CTLA4, wherein expression of CTLA4 is increased in the T cell relative to expression of CTLA4 in a T cell not comprising the heterologous polypeptide that encodes MTF1, RELA, IRF1, BCL11B, STAT3, MED30, MED14, MED11, IKZF3, KMT2A, IKZF1, MED12, TAF5L, PTEN, IRF4, FOXO1, FOXP1 or CTLA4.

[0090] In some embodiments, the T cell comprises: (a) a genetic modification or heterologous polynucleotide that inhibits expression of MTF1, RELA, IRF1, BCL11B, STAT3, MED30, MED14, MED11, IKZF3, KMT2A, IKZF1, MED12, TAF5L, PTEN, IRF4, FOXO1, FOXP1 or CTLA4, wherein expression of CTLA4 is decreased in the T cell relative to expression of CTLA4 in a T cell not comprising the genetic modification or the heterologous polynucleotide that inhibits expression of MTF1, RELA, IRF1, BCL11B, STAT3, MED30, MED14, MED11, IKZF3, KMT2A, IKZF1, MED12, TAF5L, PTEN, IRF4, FOXO1, FOXP1 or CTLA4; and/or (b) a heterologous polypeptide that encodes CBTB, MYB, ZNF217, FOXK1, FLI1, FOX, SATB1, IL2 or ATXN7L3, wherein expression of CTLA4 is decreased in the T cell relative to expression of CTLA4 in a T cell not comprising the heterologous polypeptide that encodes CBTB, MYB, ZNF217, FOXK1, FLI1, FOX, SATB1, IL2 or ATXN7L3.

[0091] In some embodiments, inhibition of one or more nuclear factors set forth in Table 3 and/or overexpression of one or more nuclear factors set forth in Table 4 may increase FOXP3 expression in the T cell. In some embodiments, inhibition of one or more nuclear factors set forth in Table 4, and/or overexpression of one or more nuclear factor set forth in Table 3 may decrease FOXP3 expression in the T cell.

[0092] In some embodiments, the T cell comprises: (a) a genetic modification or heterologous polynucleotide that inhibits expression of ETS1, MYBL2, MYB, TP53, FLI1, SATB1, MBD2, ZBTB7A, DNMT1, TFDP1, SMARCB1 or MAF, wherein expression of FOXP3 is increased in the T cell relative to expression of FOXP3 in a T cell not comprising the genetic modification or heterologous polynucleotide that inhibits expression of ETS1, MYBL2, MYB, TP53, FLI1, SATB1, MBD2, ZBTB7A, DNMT1, TFDP1, SMARCB1 or MAF; and/or (b) a heterologous polypeptide that encodes a TAF5L, FOXP3, GATA3, STAT5B, FOXP1, STAT5A, PTEN or FOXO1, wherein expression of FOXP3 is increased in the T cell relative to expression of FOXP3 in a T cell not comprising a heterologous polypeptide that encodes a TAF5L, FOXP3, GATA3, STAT5B, FOXP1, STAT5A, PTEN or FOXO1.

[0093] In some embodiments, the T cell comprises: (a) a genetic modification or heterologous polynucleotide that inhibits expression of TAF5L, FOXP3, GATA3, STAT5B, FOXP1, STAT5A, PTEN or FOXO1, wherein expression of FOXP3 is decreased in the T cell relative to expression of FOXP3 in a T cell not comprising the genetic modification or heterologous polynucleotide that inhibits expression of TAF5L, FOXP3, GATA3, STAT5B, FOXP1, STAT5A, PTEN or FOXO1; and/or (b) a heterologous polypeptide that encodes ETS1, MYBL2, MYB, TP53, FLI1, SATB1, MBD2, ZBTB7A, DNMT1, TFDP1, SMARCB1 or MAF, wherein expression of FOXP3 is decreased in the T cell relative to expression of FOXP3 in a T cell not comprising a heterologous polypeptide that encodes ETS1, MYBL2, MYB, TP53, FLI1, SATB1, MBD2, ZBTB7A, DNMT1, TFDP1, SMARCB1 or MAF.

[0094] In some embodiments, inhibition of one or more nuclear factors set forth in Table 5 and/or overexpression of one or more nuclear factors set forth in Table 6 may increase IL-2 expression in the T cell. In some embodiments, inhibition of one or more nuclear factors set forth in Table 6, and/or overexpression of one or more nuclear factor set forth in Table 5 may decrease IL-2 expression in the T cell.

[0095] In some embodiments, the T cell comprises: (a) a genetic modification or heterologous polynucleotide that inhibits expression of MED12, FOXP1, PTEN, IKZF1, TAF5L, PRDM1, TFDP1, CXXC1, IKZF3 or TP53, wherein expression of IL-2 is increased in the T cell relative to expression of IL-2 in a T cell not comprising the genetic modification or heterologous polynucleotide that inhibits expression of MED12, FOXP1, PTEN, IKZF1, TAF5L, PRDM1, TFDP1, CXXC1, IKZF3 or TP53; and/or (b) a heterologous polypeptide that encodes NFATC2, MAF, ZBTB7A, MBD2, GATA3, MED14, IRF2, MED30, ZBTB11, RELA, JAK3, MED11, BCL11B, MTF1, ATXN7L3, YY1, ETS1, IL2, DNMT1, GTF2B or SMARCB1, wherein expression of IL-2 is increased in the T cell relative to expression of IL-2 in a T cell not comprising heterologous polypeptide that encodes NFATC2, MAF, ZBTB7A, MBD2, GATA3, MED14, IRF2, MED30, ZBTB11, RELA, JAK3, MED11, BCL11B, MTF1, ATXN7L3, YY1, ETS1, IL2, DNMT1, GTF2B or SMARCB1.

[0096] In some embodiments, the T cell comprises: (a) genetic modification or heterologous polynucleotide that inhibits expression of NFATC2, MAF, ZBTB7A, MBD2, GATA3, MED14, IRF2, MED30, ZBTB11, RELA, JAK3, MED11, BCL11B, MTF1, ATXN7L3, YY1, ETS1, IL2, DNMT1, GTF2B or SMARCB1, wherein expression of IL-2 is decreased in the T cell relative to expression of IL-2 in a T cell not comprising the genetic modification or heterologous polynucleotide that inhibits expression of NFATC2, MAF, ZBTB7A, MBD2, GATA3, MED14, IRF2, MED30, ZBTB1L, RELA, JAK3, MED11, BCL11B, MTF1, ATXN7L3, YY1, ETS1, IL2, DNMT1, GTF2B or SMARCB1; and/or (b) a heterologous polypeptide that encodes MED12, FOXP1, PTEN, IKZF1, TAF5L, PRDM1, TFDP1, CXXC1, IKZF3 or TP53, wherein expression of IL-2 is decreased in the T cell relative to expression of IL-2 in a T cell not comprising heterologous polypeptide that encodes MED12, FOXP1, PTEN, IKZF1, TAF5L, PRDM1, TFDP1, CXXC1, IKZF3 or TP53.

[0097] In some embodiments, inhibition of one or more nuclear factors set forth in Table 7 and/or overexpression of one or more nuclear factors set forth in Table 8 may increase IL2RA expression in the T cell. In some embodiments, inhibition of one or more nuclear factors set forth in Table 8, and/or overexpression of one or more nuclear factor set forth in Table 7 may decrease IL2RA expression in the T cell.

[0098] In some embodiments, the T cell comprises: (a) a genetic modification or heterologous polynucleotide that inhibits expression of MED12, CBFB, HIVEP2, KLF2, MYB, FOXK1, ZNF217, IRF2, TNFAIP3, MYC, PRDM1, TFDP1, IRF1, FOXO1, ATXN7L3 or TP53, wherein expression of IL2RA is increased in the T cell relative to expression of IL2RA in a T cell not comprising the genetic modification or heterologous polynucleotide that inhibits expression of MED12, CBFB, HIVEP2, KLF2, MYB, FOXK1, ZNF217, IRF2, TFNAIP3, MYC, PRDM1, TFDP1, IRF1, FOXO1, ATXN7L3 or TP53; and/or (b) a heterologous polypeptide that encodes IKZF3, YY1, MBD2, IRF4, IKZF1, RXRB, RELA, ETS1, KMT2A, PTEN, JAK3, STAT5A, GATA3, FOXP1, STAT5B, or IL2RA, wherein expression of IL2RA is increased in the T cell relative to expression of IL2RA in a T cell not comprising the heterologous polypeptide that encodes IKZF3, YY1, MBD2, IRF4, IKZF1, RXRB, RELA, ETS1, KMT2A, PTEN, JAK3, STAT5A, GATA3, FOXP1, STAT5B, or IL2RA.

[0099] In some embodiments, the T cell comprises: (a) a genetic modification or heterologous polynucleotide that inhibits expression of IKZF3, YY1, MBD2, IRF4, IKZF1, RXRB, RELA, ETS1, KMT2A, PTEN, JAK3, STAT5A, GATA3, FOXP1, STAT5B, or IL2RA, wherein expression of IL2RA is decreased in the T cell relative to expression of IL2RA in a T cell not comprising the genetic modification or heterologous polynucleotide that inhibits expression of IKZF3, YY1, MBD2, IRF4, IKZF1, RXRB, RELA, ETS1, KMT2A, PTEN, JAK3, STAT5A, GATA3, FOXP1, STAT5B, or IL2RA; and/or (b) a heterologous polypeptide that encodes MED12, CBFB, HIVEP2, KLF2, MYB, FOXK1, ZNF217, IRF2, TFNAIP3, MYC, PRDM1, TFDP1, IRF1, FOXO1, ATXN7L3 or TP53, wherein expression of IL2RA is decreased in the T cell relative to expression of IL2RA in a T cell not comprising heterologous polypeptide that encodes MED12, CBFB, HIVEP2, KLF2, MYB, FOXK1, ZNF217, IRF2, TFNAIP3, MYC, PRDM1, TFDP1, IRF1, FOXO1, ATXN7L3 or TP53.

[0100] In some embodiments, inhibition of one or more nuclear factors set forth in Table 9 and/or overexpression of one or more nuclear factors set forth in Table 10 may increase IL2RA expression in an effector T cell. In some embodiments, IL2RA is specifically increased in an effector T cell as compared to a regulatory T cell. In some embodiments, inhibition of one or more nuclear factors set forth in Table 10, and/or overexpression of one or more nuclear factor set forth in Table 9 may decrease IL2RA expression in an effector T cell. In some embodiments, IL2RA is specifically decreased in an effector T cell as compared to a regulatory T cell.

[0101] In some embodiments, inhibition of one or more nuclear factors set forth in Table 11 and/or overexpression of one or more nuclear factors set forth in Table 12 may increase IL2RA expression in a regulatory T cell. In some embodiments, IL2RA is specifically increased in a regulatory T cell as compared to an effector T cell. In some embodiments, inhibition of one or more nuclear factors set forth in Table 12, and/or overexpression of one or more nuclear factor set forth in Table 11 may decrease IL2RA expression in a regulatory T cell. In some embodiments, IL2RA is specifically decreased in a regulatory T cell as compared to an effector T cell.

[0102] In some embodiments, inhibition of one or more nuclear factors set forth in Table 13 and/or overexpression of one or more nuclear factors set forth in Table 14 may increase IL2RA expression in an effector T cell and a regulatory T cell. In some embodiments, inhibition of one or more nuclear factors set forth in Table 14, and/or overexpression of one or more nuclear factor set forth in Table 13 may decrease IL2RA expression in an effector T cell and a regulatory T cell.

[0103] Table 1 provides nuclear factors that, when inhibited, increase CTLA4 expression (CTLA4 high). Overexpression of a nuclear factor set forth in Table 1 may decrease CTLA4 expression. Table 2 provides nuclear factors that, when inhibited, decrease CTLA4 expression (CTLA4 low). Overexpression of a nuclear factor set forth in Table 2 may increase CTLA4 expression.

[0104] Table 3 provides nuclear factors that, when inhibited, increase FOXP3 expression (FOXP3 high). Overexpression of a nuclear factor set forth in Table 3 may decrease FOXP3 expression. Table 4 provides nuclear factors that, when inhibited, decrease FOXP3 expression (FOXP3 low). Overexpression of a nuclear factor set forth in Table 4 may increase FOXP3 expression.

[0105] Table 5 provides nuclear factors that, when inhibited, increase IL-2 expression (IL-2 high). Overexpression of a nuclear factor set forth in Table 5 may decrease IL-2 expression (IL-2 low). Table 6 provides nuclear factors that, when inhibited, decrease IL-2 expression. Overexpression of a nuclear factor set forth in Table 6 may increase IL-2 expression.

[0106] Table 7 provides nuclear factors that, when inhibited, increase IL2RA expression (IL2RA high). Overexpression of a nuclear factor set forth in Table 7 may decrease IL-2RA expression. Table 8 provides nuclear factors that, when inhibited, decrease IL2RA expression (IL2RA low). Overexpression of a nuclear factor set forth in Table 8 may increase IL2RA expression.

[0107] Table 9 provides nuclear factors that, when inhibited, increase IL2RA expression in effector T cells as compared to regulatory T cells (IL2RA high). Overexpression of a nuclear factor set forth in Table 9 may decrease IL-2RA expression. Table 10 provides nuclear factors that, when inhibited, decrease IL2RA expression in effector T cells as compared to regulatory T cells (IL2RA low). Overexpression of a nuclear factor set forth in Table 10 may increase IL-2RA expression.

[0108] Table 11 provides nuclear factors that, when inhibited, increase IL2RA expression in regulatory T cells as compared to effector T cells (IL2RA high). Overexpression of a nuclear factor set forth in Table 11 may decrease IL-2RA expression. Table 12 provides nuclear factors that, when inhibited, decrease IL2RA expression in regulatory T cells as compared to effector T cells (IL2RA low). Overexpression of a nuclear factor set forth in Table 12 may increase IL-2RA expression.

[0109] Table 13 provides nuclear factors that, when inhibited, increase IL2RA expression in regulatory T cells and effector T cells (IL2RA high). Overexpression of a nuclear factor set forth in Table 13 may decrease IL-2RA expression. Table 14 provides nuclear factors that, when inhibited, decrease IL2RA expression in regulatory T cells and effector T cells (IL2RA low). Overexpression of a nuclear factor set forth in Table 14 may increase IL-2RA expression.

[0110] In some embodiments, expression of an amino acid sequence having at least about 80%, 85%, 90%, 95% or 99% identity to an amino acid sequence set forth in Table 1, Table 2, Table 3, Table 4, Table 5, Table 6, Table 7, Table 8, Table 9, Table 10, Table 11, Table 12, Table 13 or Table 14 is inhibited. In some embodiments, an amino acid sequence having at least about 80%, 85%, 90%, 95% or 99% identity to an amino acid sequence set forth in Table 1, Table 2, Table 3, Table 4, Table 5, Table 6, Table 7, Table 8, Table 9, Table 10, Table 11, Table 12, Table 13 or Table 14 is overexpressed. It is understood that, when referring to one or more nuclear factors set forth in Table 1, Table 2, Table 3, Table 4, Table 5, Table 6, Table 7, Table 8, Table 9, Table 10, Table 11, Table 12, Table 13 or Table 14, this can be the protein, i.e., the nuclear factor, or the polynucleotide encoding the nuclear factor.

[0111] In some embodiments of the methods described herein, inhibiting the expression of a nuclear factor set forth in Table 1, Table 2, Table 3, Table 4, Table 5, Table 6, Table 7, Table 8, Table 9, Table 10, Table 11, Table 12, Table 13 or Table 14 may comprise reducing expression of the nuclear factor or reducing expression of a polynucleotide, for example, an mRNA, encoding the nuclear factor in the T cell. In some embodiments expression of one or more nuclear factors set forth in Table 1, Table 2, Table 3, Table 4, Table 5, Table 6, Table 7, Table 8, Table 9, Table 10, Table 11, Table 12, Table 13 or Table 14 is inhibited in the T cell. As described in detail further herein, one or more available methods may be used to inhibit the expression of one or more nuclear factors set forth in Table 1, Table 2, Table 3, Table 4, Table 5, Table 6, Table 7, Table 8, Table 9, Table 10, Table 11, Table 12, Table 13 or Table 14.

[0112] In some embodiments of the methods described herein, overexpressing a nuclear factor set forth in Table 1, Table 2, Table 3, Table 4, Table 5, Table 6, Table 7, Table 8, Table 9, Table 10, Table 11, Table 12, Table 13 or Table 14 may comprise introducing a polynucleotide encoding the nuclear factor into the T cell. In other embodiments of the methods described herein, overexpressing a nuclear factor set forth in Table 1, Table 2, Table 3, Table 4, Table 5, Table 6, Table 7, Table 8, Table 9, Table 10, Table 11, Table 12, Table 13 or Table 14 may comprise introducing an agent that induces expression of the endogenous gene encoding the nuclear factor in the T cell. For example, RNA activation, where short double-stranded RNAs induce endogenous gene expression by targeting promoter sequences, can be used to induce endogenous gene expression (See, for example, Wang et al. “Inducing gene expression by targeting promoter sequences using small activating RNAs,” J. Biol. Methods 2(1): e14 (2015). In another example, artificial transcription factors containing zinc-finger binding domains can be used to activate or repress expression of endogenous genes. See, for example, Dent et al., “Regulation of endogenous gene expressing using small molecule-controlled engineered zinc-finger protein transcription factors,” Gene Ther. 14(18): 1362-9 (2007).

[0113] In some embodiments, inhibiting expression may comprise contacting a polynucleotide encoding the nuclear factor, with a target nuclease, a guide RNA (gRNA), an siRNA, an antisense RNA, microRNA (miRNA), or short hairpin RNA (shRNA). In particular embodiments, if a gRNA and a target nuclease (e.g., Cas9) are used to inhibit the expression of a polynucleotide encoding a human nuclear factor set forth in Table 1, Table 2, Table 3, Table 4, Table 5, Table 6, Table 7, Table 8, Table 9, Table 10, Table 11, Table 12, Table 13 or Table 14, the gRNA may comprise a sequence set forth in Tables 1-8, a sequence complementary to a sequence set forth in Tables 1-14, or a portion thereof. Table 1, Table 2, Table 3, Table 4, Table 5, Table 6, Table 7, Table 8, Table 9, Table 10, Table 11, Table 12, Table 13 or Table 14 provide the Gene ID number, Genbank Accession No. for mRNA, genomic sequence, position in the genome after nuclease cutting, sgRNA target sequence, target context sequence, PAM sequence, and the exon targeted by the sgRNA for each nuclear factor set forth in Table 1, Table 2, Table 3, Table 4, Table 5, Table 6, Table 7, Table 8, Table 9, Table 10, Table 11, Table 12, Table 13 or Table 14

[0114] As described herein. T cells may be modified by inhibiting the expression of the one or more nuclear factors set forth in Table 1, Table 2, Table 3, Table 4, Table 5, Table 6, Table 7, Table 8, Table 9, Table 10, Table 11, Table 12, Table 13 or Table 14. For example, one or more nuclear factors selected from the group consisting of CBFB, MYB, ZNF217, FOXK1, FLI1, FOS, SATB1, IL2, ATXN7L3, MTF1, RELA, IRF1, BCL11B, STAT3, MED30, MED14, MED11, IKZF3, KMT2A, IKZF1, MED12, TAF5L, PTEN, IRF4, FOXO1, FOXP1, CTLA4, ETS1, MYBL2, TP53, MBD2, ZBTB7A, DNMT1, HIVEP2, KLF2, TFDP1, SMARCB1, MAF, FOXP3, GATA3, STAT5B, STAT5A, PRDM1, TNFAIP3, RXRB, TFDP1, CXXC1, NFATC2, MAF, IRF2, ZBTB11, JAK3, YY1, IL2RA and GTF2B, can be inhibited in a T cell.

[0115] T cells may also be modified by overexpressing one or more nuclear factors set forth in Table 1, Table 2, Table 3, Table 4, Table 5, Table 6, Table 7, Table 8, Table 9, Table 10, Table 11, Table 12, Table 13 or Table 14. For example, one or more nuclear factors selected from the group consisting of CBFB, MYB, ZNF217, FOXK1, FLI1, FOS, SATB1, IL2, ATXN7L3, MTF1, RELA, IRF1, BCL11B, STAT3, MED30, MED14, MED11, IKZF3. KMT2A, IKZF1, MED12, TAF5L, PTEN, IRF4, FOXO1, FOXP1, CTLA4, ETS1, MYBL2, TP53, MBD2, ZBTB7A, DNMT1, HIVEP2, KLF2, TFDP1, SMARCB1, MAF, FOXP3, GATA3, STAT5B, STAT5A, PRDM1, TNFAIP3, RXRB, TFDP1, CXXC1, NFATC2, MAF, IRF2, ZBTB11, JAK3, YY1, IL2RA and GTF2B, can be overexpressed in a T cell.

[0116] Subsequently, once modified T cells, for example, human T cells, are created, the modified T cells may be administered to a human. Depending on the modification, the modified T cells may be used to treat different indications. For example, T cells may be isolated from a whole blood sample of a human and expanded ex vivo. The expanded T cells may then be treated to inhibit the expression of a nuclear factor set forth in Table 1, Table 2, Table 3, Table 4, Table 5, Table 6, Table 7, Table 8, Table 9, Table 10, Table 11, Table 12, Table 13 or Table 14 thus, creating modified T cells. For example, one or more nuclear factors set forth in Table 1, Table 2, Table 3, Table 4, Table 5, Table 6, Table 7, Table 8, Table 9, Table 10, Table 11, Table 12, Table 13 or Table 14. For example, one or more nuclear factors selected from the group consisting of CBFB, MYB, ZNF217, FOXK1, FLI1, FOS, SATB1, IL2, ATXN7L3, MTF1, RELA, IRF1, BCL11B, STAT3, MED30, MED14, MED11, IKZF3, KMT2A, IKZF1, MED12, TAF5L, PTEN, IRF4, FOXO1, FOXP1, CTLA4, ETS1, MYBL2, TP53, MBD2, ZBTB7A, DNMT1, HIVEP2, KLF2, TFDP1, SMARCB1, MAF, FOXP3, GATA3, STAT5B, STAT5A, PRDM1, TNFAIP3, RXRB, TFDP1, CXXC1, NFATC2, MAF, IRF2, ZBTB11, JAK3, YY1, IL2RA and GTF2B, can be inhibited in the T cell.

[0117] The modified T cells may be reintroduced to the human to treat certain indications. In some embodiments, T cells having less immunosuppressive effects or enhanced cytotoxic or cell-killing effects may be used to treat cancer. In some embodiments, T cells having improved immunosuppressive effects may be used to treat autoimmune diseases.

[0118] In other cases, T cells in a subject can be modified in vivo, for example, by using a targeted vector, such as, a lentiviral vector, a retroviral vector an adenoviral or adeno-associated viral vector. In vivo delivery of targeted nucleases that modify the genome of a T cell can also be used. See for example, U.S. Pat. No. 9,737,604 and Zhang et al. “Lipid nanoparticle-mediated efficient delivery of CRISPR-Cas9 for tumor therapy,” NPG Asia Materials Volume 9, page e441 (2017).

[0119] Also provided is a T cell wherein expression of one or more nuclear factors set forth in Table 1, Table 2, Table 3, Table 4, Table 5, Table 6, Table 7, Table 8, Table 9, Table 10, Table 11, Table 12, Table 13 or Table 14 is inhibited. In some embodiments, expression of one or more nuclear factors selected from the group consisting of CBFB, MYB, ZNF217, FOXK1, FLI1, FOS, SATB1, IL2, ATXN7L3, MTF1, RELA, IRF1, BCL11B, STAT3, MED30, MED14, MED11, IKZF3, KMT2A, IKZF1, MED12, TAF5L, PTEN, IRF4, FOXO1, FOXP1, CTLA4, ETS1, MYBL2, TP53, MBD2, ZBTB7A, DNMT1, HIVEP2, KLF2, TFDP1, SMARCB1, MAF, FOXP3, GATA3, STAT5B, STAT5A, PRDM1, TNFAIP3, RXRB, TFDP1, CXXC1, NFATC2, MAF, IRF2, ZBTB11, JAK3, YY1, IL2RA and GTF2B, is inhibited in a T cell.

[0120] Further provided is a T cell wherein one or more nuclear factors set forth in Table 1. Table 2, Table 3, Table 4, Table 5, Table 6, Table 7, Table 8, Table 9, Table 10, Table 11, Table 12, Table 13 or Table 14 is overexpressed. In some embodiments, one or more nuclear factors selected from the group consisting of CBFB, MYB, ZNF217, FOXK1, FLI1, FOS, SATB1, IL2, ATXN7L3, MTF1, RELA, IRF1, BCL11B, STAT3, MED30, MED14, MED11, IKZF3, KMT2A, IKZF1, MED12, TAF5L, PTEN, IRF4, FOXO1, FOXP1, CTLA4, ETS1, MYBL2, TP53, MBD2, ZBTB7A, DNMT1, HIVEP2, KLF2, TFDP1, SMARCB1, MAF, FOXP3, GATA3, STAT5B, STAT5A, PRDM1, TNFAIP3, RXRB, TFDP1, CXXC1, NFATC2, MAF, IRF2, ZBTB11, JAK3, YY1, IL2RA and GTF2B, is overexpressed in a T cell

[0121] The disclosure also features a T cell comprising a genetic modification or heterologous polynucleotide that inhibits expression of one or more nuclear factors set forth in Table 1, Table 2, Table 3, Table 4, Table 5, Table 6, Table 7, Table 8, Table 9, Table 10, Table 11, Table 12, Table 13 or Table 14 and/or a heterologous polynucleotide that encodes a nuclear factor set forth in Table 1, Table 2, Table 3, Table 4, Table 5, Table 6, Table 7, Table 8, Table 9, Table 10, Table 11, Table 12, Table 13 or Table 14.

[0122] In some embodiments, the T cell comprises (a) a genetic modification or heterologous polynucleotide that inhibits expression of CBFB, MYB, ZNF217, FOXK1. FLI1, FOS, SATB1, IL2, ATXN7L3, MTF1, RELA, IRF1, BCL11B, STAT3, MED30, MED14, MED11, IKZF3, KMT2A, IKZF1, MED12, TAF5L, PTEN, IRF4, FOXO1, FOXP1, CTLA4, ETS1, MYBL2, TP53, MBD2, ZBTB7A, DNMT1, HIVEP2, KLF2, TFDP1, SMARCB1, MAF, FOXP3, GATA3, STAT5B. STAT5A, PRDM1, TNFAIP3, RXRB, TFDP1, CXXC1, NFATC2, MAF, IRF2, ZBTB11, JAK3, YY1, IL2RA or GTF2B; and/or (b) a heterologous polynucleotide that encodes CBFB, MYB, ZNF217, FOXK1, FLI1, FOS, SATB1, IL2. ATXN7L3, MTF1, RELA, IRF1, BCL11B, STAT3, MED30, MED14. MED11, IKZF3, KMT2A, IKZF1, MED12, TAF5L, PTEN, IRF4, FOXO1, FOXP1, CTLA4, ETS1, MYBL2, TP53, MBD2, ZBTB7A, DNMT1, TFDP1, SMARCB1, MAF, FOXP3, GATA3, STAT5B, STAT5A, PRDM1, TNFAIP3, RXRB, TFDP1, CXXC1, NFATC2, MAF, IRF2, ZBTB11, JAK3, YY1, IL2RA or GTF2B.

[0123] It is understood that one or more nuclear factors selected from the group consisting of CBFB, MYB, ZNF217, FOXK1, FLI1, FOS, SATB1, IL2, ATXN7L3, MTF1, RELA, IRF1, BCL11B, STAT3, MED30, MED14, MED11, IKZF3, KMT2A, IKZF1, MED12, TAF5L. PTEN, IRF4, FOXO1, FOXP1, CTLA4, ETS1, MYBL2. TP53, MBD2, ZBTB7A, DNMT1, HIVEP2, KLF2, TFDP1, SMARCB1, MAF, FOXP3, GATA3, STAT5B, STAT5A, PRDM1, TNFAIP3, RXRB, TFDP1, CXXC1, NFATC2, MAF, IRF2, ZBTB11, JAK3, YY1, IL2RA and GTF2B, can be inhibited and/or overexpressed in the T cells provided herein.

[0124] In some embodiments, the T cell comprises a genetic modification or heterologous polynucleotide that inhibits expression of a nuclear factor set forth in Table 1 and/or a heterologous polynucleotide that encodes a nuclear factor set forth in Table 2, and wherein expression of CTLA4 is increased in the T cell relative to expression of CTLA4 in a T cell not comprising the genetic modification or heterologous polynucleotide.

[0125] In some embodiments, the T cell comprises: (a) a genetic modification or a heterologous polynucleotide that inhibits expression of CBFB, MYB, ZNF217, FOXK1, FLI1, FOS, SATB1, IL2 or ATXN7L3, wherein expression of CTLA4 is increased in the T cell relative to expression of CTLA4 in a T cell not comprising the genetic modification or the heterologous polynucleotide that inhibits expression of CBFB, MYB, ZNF217, FOXK1, FLI1, FOS, SATB1, IL2 or ATXN7L3; and/or (b) a heterologous polynucleotide that encodes MTF1, RELA, IRF1, BCL11B, STAT3, MED30, MED14, MED11, IKZF3, KMT2A, IKZF1, MED12, TAF5L, PTEN, IRF4, FOXO1, FOXP1 or CTLA4, wherein expression of CTLA4 is increased in the T cell relative to expression of CTLA4 in a T cell not comprising the heterologous polynucleotide that encodes MTF1, RELA, IRF1, BCL11B, STAT3, MED30, MED14, MED11, IKZF3, KMT2A, IKZF1, MED12, TAF5L, PTEN, IRF4, FOXO1, FOXP1 or CTLA4.

[0126] In some embodiments, the T cell comprises a genetic modification or heterologous polynucleotide that inhibits expression of a nuclear factor set forth in Table 2, and/or a heterologous polynucleotide that encodes a nuclear factor set forth in Table 1, and wherein expression of CTLA4 is decreased in the T cell relative to expression of CTLA4 in a T cell not comprising the genetic modification or heterologous polynucleotide.

[0127] In some embodiments, the T cell comprises: (a) a genetic modification or heterologous polynucleotide that inhibits expression of MTF1, RELA, IRF1, BCL11B, STAT3, MED30, MED14, MED11, IKZF3, KMT2A, IKZF1, MED12, TAF5L, PTEN, IRF4, FOXO1, FOXP1 or CTLA4, wherein expression of CTLA4 is decreased in the T cell relative to expression of CTLA4 in a T cell not comprising the genetic modification or the heterologous polynucleotide that inhibits expression of MTF1, RELA, IRF1, BCL11B, STAT3. MED30, MED14, MED11, IKZF3, KMT2A, IKZF1, MED12, TAF5L, PTEN, IRF4, FOXO1, FOXP1 or CTLA4; and/or (b) a heterologous polynucleotide that encodes CBTB, MYB, ZNF217, FOXK1, FLI1, FOX, SATB1, IL2 or ATXN7L3, wherein expression of CTLA4 is decreased in the T cell relative to expression of CTLA4 in a T cell not comprising the heterologous polynucleotide that encodes CBTB, MYB, ZNF217, FOXK1, FLI1, FOX, SATB1, IL2 or ATXN7L3.

[0128] In some embodiments, the T cell comprises a genetic modification or heterologous polynucleotide that inhibits expression of a nuclear factor set forth in Table 3 and/or a heterologous polypeptide that encodes a nuclear factor set forth in Table 4, and wherein expression of FOXP3 is increased in the T cell relative to expression of FOXP3 in a T cell not comprising the genetic modification or heterologous polynucleotide.

[0129] In some embodiments, the T cell comprises: (a) a genetic modification or heterologous polynucleotide that inhibits expression of ETS1, MYBL2, MYB, TP53, FLI1, SATB1, MBD2. ZBTB7A, DNMT1, TFDP1, SMARCB1 or MAF, wherein expression of FOXP3 is increased in the T cell relative to expression of FOXP3 in a T cell not comprising the genetic modification or heterologous polynucleotide that inhibits expression of ETS1, MYBL2, MYB, TP53, FLI1, SATB1, MBD2, ZBTB7A, DNMT1, TFDP1, SMARCB1 or MAF; and/or (b) a heterologous polynucleotide that encodes a TAF5L, FOXP3, GATA3. STAT5B, FOXP1, STAT5A, PTEN or FOXO1, wherein expression of FOXP3 is increased in the T cell relative to expression of FOXP3 in a T cell not comprising a heterologous polynucleotide that encodes a TAF5L, FOXP3, GATA3, STAT5B, FOXP1, STAT5A, PTEN or FOXO1.

[0130] In some embodiments, the T cell is a Treg cell and increasing FOXP3 expression in the cell stabilizes the Treg cells. In some examples, stabilized Treg cells are used to treat autoimmune disorders, assist in organ transplantation, to treat graft versus host disease, or inflammation.

[0131] In some embodiments, the T cell comprises a genetic modification or heterologous polynucleotide that inhibits expression of a nuclear factor set forth in Table 4, and/or a heterologous polynucleotide that encodes a nuclear factor set forth in Table 3, and wherein expression of FOXP3 is decreased in the T cell relative to expression of FOXP3 in a T cell not comprising the genetic modification or heterologous polynucleotide.

[0132] In some embodiments, the T cell comprises: (a) a genetic modification or heterologous polynucleotide that inhibits expression of TAF5L, FOXP3, GATA3, STAT5B, FOXP1, STAT5A, PTEN or FOXO1, wherein expression of FOXP3 is decreased in the T cell relative to expression of FOXP3 in a T cell not comprising the genetic modification or heterologous polynucleotide that inhibits expression of TAF5L, FOXP3, GATA3, STAT5B, FOXP1, STAT5A, PTEN or FOXO1; and/or (b) a heterologous polynucleotide that encodes ETS1, MYBL2, MYB, TP53, FLI1, SATB1, MBD2, ZBTB7A, DNMT1, TFDP1, SMARCB1 or MAF, wherein expression of FOXP3 is decreased in the T cell relative to expression of FOXP3 in a T cell not comprising a heterologous polynucleotide that encodes ETS1, MYBL2, MYB, TP53, FLI1, SATB1, MBD2, ZBTB7A, DNMT1, TFDP1, SMARCB1 or MAF.

[0133] In some embodiments, the T cell is a Treg cell and decreasing FOXP3 expression in the cell destabilizes the Treg cells. In some examples, destabilized Treg cells are used to treat cancer.

[0134] In some embodiments, the T cell comprises a genetic modification or heterologous polynucleotide that inhibits expression of a nuclear factor set forth in Table 5, and/or a heterologous polynucleotide that encodes a nuclear factor set forth in Table 6, and wherein expression of IL-2 is increased in the T cell relative to expression of IL-2 in a T cell not comprising the genetic modification or heterologous polynucleotide.

[0135] In some embodiments, the T cell comprises: (a) a genetic modification or heterologous polynucleotide that inhibits expression of MED12, FOXP1, PTEN, IKZF1, TAF5L, PRDM1, TFDP1, CXXC1. IKZF3 or TP53, wherein expression of IL-2 is increased in the T cell relative to expression of IL-2 in a T cell not comprising the genetic modification or heterologous polynucleotide that inhibits expression of MED12, FOXP1, PTEN, IKZF1, TAF5L, PRDM1, TFDP1, CXXC1, IKZF3 or TP53; and/or (b) a heterologous polynucleotide that encodes NFATC2, MAF, ZBTB7A, MBD2, GATA3, MED14, IRF2. MED30. ZBTB11. RELA, JAK3, MED11, BCL11B, MTF1, ATXN7L3, YY1, ETS1, IL2, DNMT1, GTF2B or SMARCB1, wherein expression of IL-2 is increased in the T cell relative to expression of IL-2 in a T cell not comprising heterologous polynucleotide that encodes NFATC2, MAF, ZBTB7A, MBD2, GATA3, MED14. IRF2, MED30, ZBTB11, RELA, JAK3, MED11, BCL11B, MTF1, ATXN7L3, YY1, ETS1, IL2, DNMT1, GTF2B or SMARCB1.

[0136] In some examples, a Treg cell having increased IL-2 expression can be used to treat autoimmune disease or cancer. In some embodiments, the T cell is a conventional T cell, for example, CD4+ or CD8+ T cell, with increased IL-2 expression. In some examples, a conventional T cell having increased IL-2 expression can be used to treat cancer.

[0137] In some embodiments, the T cell comprises a genetic modification or heterologous polynucleotide that inhibits expression of a nuclear factor set forth in Table 6, and/or a heterologous polypeptide that encodes a nuclear factor set forth in Table 5, and wherein expression of IL-2 is decreased in the T cell relative to expression of IL-2 in a T cell not comprising the genetic modification or heterologous polynucleotide.

[0138] In some embodiments, the T cell comprises: (a) genetic modification or heterologous polynucleotide that inhibits expression of NFATC2, MAF, ZBTB7A, MBD2. GATA3, MED14, IRF2, MED30, ZBTB11, RELA, JAK3, MED11, BCL11B, MTF1, ATXN7L3, YY1, ETS1, IL2, DNMT1, GTF2B or SMARCB1, wherein expression of IL-2 is decreased in the T cell relative to expression of IL-2 in a T cell not comprising the genetic modification or heterologous polynucleotide that inhibits expression of NFATC2, MAF, ZBTB7A, MBD2, GATA3, MED14. IRF2, MED30, ZBTB11, RELA, JAK3, MED11, BCL11B, MTF1, ATXN7L3, YY1, ETS1, IL2, DNMT1, GTF2B or SMARCB1; and/or (b) a heterologous polynucleotide that encodes MED12, FOXP1, PTEN, IKZF1, TAF5L, PRDM1, TFDP1, CXXC1, IKZF3 or TP53, wherein expression of IL-2 is decreased in the T cell relative to expression of IL-2 in a T cell not comprising heterologous polynucleotide that encodes MED12, FOXP1, PTEN, IKZF1, TAF5L, PRDM1, TFDP1, CXXC1, IKZF3 or TP53.

[0139] In some embodiments, the T cell is a conventional T cell, for example, CD4+ or CD8+ T cell, with decreased IL-2 expression. In some examples, a conventional T cell having decreased IL-2 expression can be used to treat autoimmune disease.

[0140] In some embodiments, the T cell comprises a genetic modification or heterologous polynucleotide that inhibits expression of a nuclear factor set forth in Table 7, and/or a heterologous polypeptide that encodes a nuclear factor set forth in Table 8, and wherein expression of IL2RA is increased in the T cell relative to expression of IL2RA in a T cell not comprising the genetic modification or heterologous polynucleotide.

[0141] In some embodiments, the T cell comprises: (a) a genetic modification or heterologous polynucleotide that inhibits expression of MED12, CBFB, HIVEP2, KLF2, MYB, FOXK1, ZNF217, IRF2, TNFAIP3, MYC, PRDM1, TFDP1, IRF1, FOXO1, ATXN7L3 or TP53, wherein expression of IL2RA is increased in the T cell relative to expression of IL2RA in a T cell not comprising the genetic modification or heterologous polynucleotide that inhibits expression of MED12, CBFB, HIVEP2, KLF2, MYB, FOXK1, ZNF217, IRF2, TFNAIP3, MYC, PRDM1, TFDP1, IRF1, FOXO1, ATXN7L3 or TP53; and/or (b) a heterologous polynucleotide that encodes IKZF3, YY1, MBD2, IRF4, IKZF1, RXRB, RELA, ETS1. KMT2A, PTEN, JAK3, STAT5A, GATA3, FOXP1, STAT5B, or IL2RA, wherein expression of IL2RA is increased in the T cell relative to expression of IL2RA in a T cell not comprising the heterologous polynucleotide that encodes IKZF3, YY1, MBD2, IRF4, IKZF1, RXRB, RELA, ETS1, KMT2A. PTEN, JAK3, STAT5A, GATA3, FOXP1, STAT5B, or IL2RA.

[0142] In some examples, a Treg cell having increased IL-2RA expression can be used to treat autoimmune disease. In some embodiments, the T cell is a conventional T cell, for example, CD4+ or CD8+ T cell, with increased IL-2RA expression. In some examples, a conventional T cell having increased IL-2RA expression can be used to treat cancer.

[0143] In some embodiments, the T cell comprises a genetic modification or heterologous polynucleotide that inhibits expression of a nuclear factor set forth in Table 8, and/or a heterologous polypeptide that encodes a nuclear factor set forth in Table 7, and wherein expression of IL2RA is decreased in the T cell relative to expression of IL2RA in a T cell not comprising the genetic modification or heterologous polynucleotide.

[0144] In some embodiments, the T cell comprises: (a) a genetic modification or heterologous polynucleotide that inhibits expression of IKZF3, YY1, MBD2, IRF4, IKZF1, RXRB, RELA, ETS1, KMT2A, PTEN, JAK3, STAT5A, GATA3, FOXP1, STAT5B, or IL2RA, wherein expression of IL2RA is decreased in the T cell relative to expression of IL2RA in a T cell not comprising the genetic modification or heterologous polynucleotide that inhibits expression of IKZF3, YY1, MBD2, IRF4, IKZF1, RXRB, RELA, ETS1, KMT2A, PTEN, JAK3, STAT5A, GATA3, FOXP1, STAT5B, or IL2RA; and/or (b) a heterologous polynucleotide that encodes MED12, CBFB, HIVEP2, KLF2, MYB, FOXK1, ZNF217, IRF2, TFNAIP3, MYC, PRDM1, TFDP1, IRF1, FOXO1, ATXN7L3 or TP53, wherein expression of IL2RA is decreased in the T cell relative to expression of IL2RA in a T cell not comprising heterologous polynucleotide that encodes MED12, CBFB, HIVEP2, KLF2, MYB, FOXK1, ZNF217, IRF2, TFNAIP3, MYC, PRDM1, TFDP1, IRF1, FOXO1, ATXN7L3 or TP53.

[0145] In some examples, a Treg cell having decreased IL-2RA expression can be used to treat cancer. In some embodiments, the T cell is a conventional T cell, for example, CD4+ or CD8+ T cell, with decreased IL-2RA expression. In some examples, a conventional T cell having decreased IL-2RA expression can be used to treat autoimmune disease.

[0146] In some embodiments, the T cell is a Treg cell. In some embodiments, the T cell is a CD8+, a CD4+ or a CD8+CD4+ T cell. Also provided, are populations of cells comprising any of the genetically modified T cells described herein.

[0147] A genetic modification may be a nucleotide mutation or any sequence alteration in the polynucleotide encoding the nuclear factor that results in the inhibition of the expression of the nuclear factor. A heterologous polynucleotide may refer to a polynucleotide originally encoding the nuclear factor but is altered, i.e., comprising one or more nucleotide mutations or sequence alterations. In some embodiments, the heterologous polynucleotide is inserted into the genome of the T cell by introducing a vector, for example, a viral vector, comprising the polynucleotide. Examples of viral vectors include, but are not limited to adeno-associated viral (AAV) vectors, retroviral vectors or lentiviral vectors. In some embodiments, the lentiviral vector is an integrase-deficient lentiviral vector.

[0148] Also disclosed herein are T cells comprising at least one guide RNA (gRNA) comprising a sequence selected from Table 1, Table 2, Table 3, Table 4, Table 5, Table 6, Table 7, Table 8, Table 9, Table 10, Table 11, Table 12. Table 13 or Table 14. The expression of one or more nuclear factors set forth in Table 1, Table 2, Table 3, Table 4, Table 5, Table 6, Table 7, Table 8, Table 9, Table 10, Table 11, Table 12, Table 13 or Table 14, in the T cells comprising the gRNAs, may be reduced in the T cells relative to the expression of the one or more nuclear factors in T cells not comprising the gRNAs. In other examples, an endogenous nuclear factor set forth in Table 1, Table 2, Table 3, Table 4, Table 5, Table 6, Table 7, Table 8, Table 9, Table 10, Table 11, Table 12, Table 13 or Table 14 can be inhibited by targeting a deactivated targeted nuclease, for example dCAs9, fused to a transcriptional repressor, to the promoter region of the endogenous nuclear factor gene. In other examples, an endogenous nuclear factor set forth in Table 1, Table 2, Table 3, Table 4, Table 5, Table 6, Table 7, Table 8, Table 9, Table 10, Table 11, Table 12, Table 13 or Table 14 can be upregulated or overexpressed by targeting a deactivated targeted nuclease, for example dCAs9, fused to a transcriptional activator, to the promoter region of the endogenous nuclear factor gene. See, for example. Qi et al. “The New State of the Art: Cas9 for Gene Activation and Repression,” Mol. and Cell. BioL, 35(22): 3800-3809 (2015).

### II. Methods of Inhibiting Expression

### CRISPR/Cas Genome Editing

[0149] The CRISPR (Clustered Regularly Interspaced Short Palindromic Repeats)/Cas (CRISPR-associated protein) nuclease system is an engineered nuclease system based on a bacterial system that can be used for genome engineering. It is based on part of the adaptive immune response of many bacteria and archaea. When a virus or plasmid invades a bacterium, segments of the invader's DNA are converted into CRISPR RNAs (crRNA) by the “immune” response. The crRNA then associates, through a region of partial complementarity, with another type of RNA called tracrRNA to guide the Cas (e.g., Cas9) nuclease to a region homologous to the crRNA in the target DNA called a “protospacer.” The Cas (e.g., Cas9) nuclease cleaves the DNA to generate blunt ends at the double-strand break at sites specified by a 20-nucleotide guide sequence contained within the crRNA transcript. The Cas (e.g., Cas9) nuclease can require both the crRNA and the tracrRNA for site-specific DNA recognition and cleavage. This system has now been engineered such that the crRNA and tracrRNA can be combined into one molecule (the “guide RNA” or “gRNA”), and the crRNA equivalent portion of the single guide RNA can be engineered to guide the Cas (e.g., Cas9) nuclease to target any desired sequence (see, e.g., Jinek et al. (2012) Science 337:816-821; Jinek et aL (2013) eLife 2:e00471; Segal (2013) eLife 2:e00563). Thus, the CRISPR/Cas system can be engineered to create a double-strand break at a desired target in a genome of a cell, and harness the cell's endogenous mechanisms to repair the induced break by homology-directed repair (HDR) or nonhomologous end-joining (NHEJ).

[0150] In some embodiments of the methods described herein, CRISPR/Cas genome editing may be used to inhibit the expression of one or more nuclear factors set forth in Table 1, Table 2, Table 3, Table 4, Table 5, Table 6, Table 7, Table 8, Table 9. Table 10, Table 11. Table 12, Table 13 or Table 14. For example, CRISPR/Cas genome editing may be used to inhibit expression of one or more nuclear factors selected from the group consisting of CBFB, MYB, ZNF217, FOXK1, FLI1, FOS, SATB1, 1L2, ATXN7L3, MTF1, RELA, IRF1, BCL11B. STAT3, MED30, MED14, MED11, IKZF3, KMT2A, IKZF1, MED12, TAF5L, PTEN, IRF4, FOXO1, FOXP1, CTLA4, ETS1, MYBL2, TP53, MBD2, ZBTB7A, DNMT1, HIVEP2, KLF2, TFDP1, SMARCB1, MAF, FOXP3, GATA3, STAT5B, STAT5A, PRDM1, TNFAIP3, RXRB, TFDP1, CXXC1, NFATC2, MAF, IRF2, ZBTB11, JAK3, YY1, IL2RA and GTF2B

[0151] In some embodiments, the Cas nuclease has DNA cleavage activity. The Cas nuclease can direct cleavage of one or both strands at a location in a target DNA sequence, i.e., a location in a polynucleotide encoding a nuclear factor set forth in Table 1, Table 2, Table 3, Table 4, Table 5, Table 6, Table 7, Table 8, Table 9, Table 10, Table 11, Table 12, Table 13 or Table 14. In some embodiments, the Cas nuclease can be a nickase having one or more inactivated catalytic domains that cleaves a single strand of a target DNA sequence.

[0152] Non-limiting examples of Cas nucleases include Cas1, Cas1B, Cas2, Cas3, Cas4, Cas5, Cas6, Cas7, Cas8, Cas9 (also known as Csn1 and Csx12), Cas10, Csy1, Csy2, Csy3. Cse1, Cse2, Csc1, Csc2, Csa5, Csn2, Csm2, Csm3, Csm4, Csm5, Csm6, Cmr1, Cmr3, Cmr4, Cmr5, Cmr6, Csb1, Csb2, Csb3, Csx17, Csx14, Csx10, Csx16, CsaX. Csx3, Csx1, Csx15, Csf1, Csf2, Csf3, Csf4, homologs thereof, variants thereof, mutants thereof, and derivatives thereof. There are three main types of Cas nucleases (type I, type II, and type III), and 10 subtypes including 5 type I. 3 type II, and 2 type III proteins (see, e.g., Hochstrasser and Doudna, Trends Biochem Sci, 2015:40(1):58-66). Type II Cas nucleases include Cas1, Cas2, Csn2, and Cas9. These Cas nucleases are known to those skilled in the art. For example, the amino acid sequence of the Streptococcus pyogenes wild-type Cas9 polypeptide is set forth, e.g., in NBCI Ref. Seq. No. NP_269215, and the amino acid sequence of Streptococcus thermophilus wild-type Cas9 polypeptide is set forth, e.g., in NBCI Ref. Seq. No. WP_011681470. Some CRISPR-related endonucleases that may be used in methods described herein are disclosed, e.g., in U.S. Application Publication Nos. 2014/0068797, 2014/0302563, and 2014/0356959.

[0153] Cas nucleases, e.g., Cas9 polypeptides, can be derived from a variety of bacterial species including, but not limited to, Veillonella atypical, Fusobacterium nucleatum, Filifactor alocis. Solobacterium moorei, Coprococcus catus, Treponema denticola. Peptoniphilus duerdenii, Catenibacterium mitsuokai, Streptococcus mutans. Listeria innocua, Staphylococcus pseudintermedius, Acidaminococcus intestine. Olsenella uli, Oenococcus kitaharae, Bifidobacterium bifidum, Lactobacillus rhamnosus. Lactobacillus gasseri, Finegoldia magna. Micoplasma mobile. Mvcoplasma gallisepticum. Mycoplasma ovipneumoniae, Mycoplasma canis, Mycoplasma synoviae, Eubacterium rectale. Streptococcus thermophilus, Eubacterium dolichum, Lactobacillus corynmformis subsp. Torquens. Ilyobacter polytropus, Ruminococcus albus, Akkermansia muciniphila, Acidothermus cellulolyticus. Biftdobacterium longum. Bifidobacterium dentium, Corynebacterium diphtheria. Elusimicrobium minutum, Nitratifractor salsuginis, Sphaerochaeta globus. Fibrobacter succinogenes subsp. Succinogenes, Bacteroides fragilis, Capnocvtophaga ochracea. Rhodopseudomonas palustris. Prevotella micans. Prevotella ruminicola, Flavobacterium columnare, Aminomonas paucivorans, Rhodospirillum rubrum. Candidatus Puniceispirillum marinum, Verminephrobacter eiseniae, Ralstonia syzvgii, Dinoroseobacter shibae. Azospirillum. Nitrobacter hamburgensis, Bradyrhizobium, Wolinella succinogenes, Campylobacter jejuni subsp. Jejuni, Helicobacter mustelae, Bacillus cereus, Acidovorax ebreus, Clostridium perfringens. Parvibaculum lavamentivorans, Roseburia intestinalis, Neisseria meningitidis. Pasteurella multocida subsp. Multocida, Sutterella wadsworthensis, proteobacterium. Legionella pneumophila, Parasutterella excrementihominis, Wolinella succinogenes, and Francisella novicida.

[0154] Wild-type Cas9 nuclease has two functional domains, e.g., RuvC and HNH, that cut different DNA strands. Cas9 can induce double-strand breaks in genomic DNA (target DNA) when both functional domains are active. The Cas9 enzyme can comprise one or more catalytic domains of a Cas9 protein derived from bacteria belonging to the group consisting of Corynebacter, Sutterella, Legionella, Treponema, Filifactor, Eubacterium, Streptococcus, Lactobacillus, Mycoplasma, Bacteroides, Flaviivola. Flavobacterium, Sphaerochaeta, Azospirillum, Gluconacetobacter. Neisseria. Roseburia, Parvibaculum, Staphylococcus. Nitratifractor, and Campylobacter. In some embodiments, the Cas9 may be a fusion protein, e.g., the two catalytic domains are derived from different bacteria species.

[0155] Useful variants of the Cas9 nuclease can include a single inactive catalytic domain, such as a RuvC⁻ or HNH⁻ enzyme or a nickase. A Cas9 nickase has only one active functional domain and can cut only one strand of the target DNA, thereby creating a single strand break or nick. In some embodiments, the Cas9 nuclease may be a mutant Cas9 nuclease having one or more amino acid mutations. For example, the mutant Cas9 having at least a D10A mutation is a Cas9 nickase. In other embodiments, the mutant Cas9 nuclease having at least a H840A mutation is a Cas9 nickase. Other examples of mutations present in a Cas9 nickase include, without limitation, N854A and N863A. A double-strand break may be introduced using a Cas9 nickase if at least two DNA-targeting RNAs that target opposite DNA strands are used. A double-nicked induced double-strand break can be repaired by NHEJ or HDR (Ran et al., 2013, Cell, 154:1380-1389). This gene editing strategy favors HDR and decreases the frequency of INDEL mutations at off-target DNA sites. Non-limiting examples of Cas9 nucleases or nickases are described in, for example, U.S. Pat. Nos. 8,895,308; 8,889,418; and 8,865,406 and U.S. Application Publication Nos. 2014/0356959, 2014/0273226 and 2014/0186919. The Cas9 nuclease or nickase can be codon-optimized for the target cell or target organism.

[0156] In some embodiments, the Cas nuclease can be a Cas9 polypeptide that contains two silencing mutations of the RuvC1 and HNH nuclease domains (D10A and H840A), which is referred to as dCas9 (Jinek et al., Science, 2012, 337:816-821; Qi et al., Cell, 152(5):1173-1183). In one embodiment, the dCas9 polypeptide from Streptococcus pyogenes comprises at least one mutation at position D10, G12, G17, E762, H840, N854, N863, H982, H983, A984, D986, A987 or any combination thereof. Descriptions of such dCas9 polypeptides and variants thereof are provided in, for example, International Patent Publication No. WO 2013/176772. The dCas9 enzyme may contain a mutation at D10, E762, H983, or D986, as well as a mutation at H840 or N863. In some instances, the dCas9 enzyme may contain a D10A or D10N mutation. Also, the dCas9 enzyme may contain a H840A, H840Y, or H840N. In some embodiments, the dCas9 enzyme may contain D10A and H840A; D10A and H840Y; D10A and H840N; D10N and H840A; D10N and H840Y; or D10N and H840N substitutions. The substitutions can be conservative or non-conservative substitutions to render the Cas9 polypeptide catalytically inactive and able to bind to target DNA.

[0157] In some embodiments, the Cas nuclease can be a high-fidelity or enhanced specificity Cas9 polypeptide variant with reduced off-target effects and robust on-target cleavage. Non-limiting examples of Cas9 polypeptide variants with improved on-target specificity include the SpCas9 (K855A), SpCas9 (K810A/K1003A/R1060A) (also referred to as eSpCas9 (1.0)), and SpCas9 (K848A/K1003A/R1060A) (also referred to as eSpCas9 (1.1)) variants described in Slaymaker et al., Science, 351(6268):84-8 (2016), and the SpCas9 variants described in Kleinstiver et al., Nature, 529(7587):490-5 (2016) containing one, two, three, or four of the following mutations: N497A, R661A, Q695A, and Q926A (e.g., SpCas9-HF1 contains all four mutations).

[0158] As described above, a gRNA may comprise a crRNA and a tracrRNAs. The gRNA can be configured to form a stable and active complex with a gRNA-mediated nuclease (e.g., Cas9 or dCas9). The gRNA contains a binding region that provides specific binding to the target genetic element. Exemplary gRNAs that may be used to target a region in a polynucleotide encoding a nuclear factor described herein are set forth in Table 1, Table 2, Table 3, Table 4, Table 5, Table 6, Table 7, Table 8, Table 9, Table 10, Table 11, Table 12, Table 13 or Table 14. A gRNA used to target a region in a polynucleotide encoding a nuclear factor set forth in Table 1, Table 2, Table 3, Table 4, Table 5, Table 6, Table 7, Table 8, Table 9, Table 10, Table 11, Table 12, Table 13 or Table 14 may comprise a sequence selected from Table 1, Table 2, Table 3, Table 4, Table 5, Table 6, Table 7, Table 8, Table 9, Table 10, Table 11, Table 12, Table 13 or Table 14, or a portion thereof.

[0159] In some embodiments, the targeted nuclease, for example, a Cpf1 nuclease or a Cas9 nuclease and the gRNA are introduced into the T cell as a ribonucleoprotein (RNP) complex. In some embodiments, the RNP complex may be introduced into about 1×10⁵ to about 2×10⁶ cells (e.g., 1×10⁵ cells to about 5×10⁵ cells, about 1×10⁵ cells to about 1×10⁶ cells, 1×10⁵ cells to about 1.5×10⁶ cells, 1×10⁵ cells to about 2×10⁶ cells, about 1×10⁶ cells to about 1.5×10⁶ cells, or about 1×10⁶ cells to about 2×10⁶ cells). In some embodiments, the T cells are cultured under conditions effective for expanding the population of modified T cells. Also disclosed herein is a population of T cells, in which the genome of at least 20%, 30%, 40%, 50%, 60%, 70%, 80%, 90%, 95%, 99% or greater of the cells comprises a genetic modification or heterologous polynucleotide that inhibits expression of one or more nuclear factors set forth in Table 1, Table 2, Table 3, Table 4, Table 5, Table 6, Table 7, Table 8, Table 9, Table 10, Table 11, Table 12, Table 13 or Table 14.

[0160] In some embodiments, the RNP complex is introduced into the T cells by electroporation. Methods, compositions, and devices for electroporating cells to introduce a RNP complex are available in the art, see, e.g., WO 2016/123578, WO/2006/001614, and Kim, J. A. et al. Biosens. Bioelectron. 23, 1353-1360 (2008). Additional or alternative methods, compositions, and devices for electroporating cells to introduce a RNP complex can include those described in U.S. Patent Appl. Pub. Nos. 2006/0094095; 2005/0064596; or 2006/0087522; Li, L. H. et al. Cancer Res. Treat. 1, 341-350 (2002); U.S. Pat. Nos.: 6,773,669; 7,186,559; 7,771,984; 7,991,559; 6,485,961; 7,029,916; and U.S. Patent Appl. Pub. Nos: 2014/0017213; and 2012/0088842; Geng, T. et al., J. Control Release 144, 91-100 (2010); and Wang, J., et al. Lab. Chip 10, 2057-2061 (2010).

[0161] In some embodiments, the sequence of the gRNA or a portion thereof is designed to complement (e.g., perfectly complement) or substantially complement (e.g., 50%, 55%, 60%, 65%, 70%, 75%, 80%, 85%, 90%, 91%, 92%, 93%, 94% 95%, 96%, 97%, 98%, or 99% complement) the target region in the polynucleotide encoding the protein. In some embodiments, the portion of the gRNA that complements and binds the targeting region in the polynucleotide is, or is about, 10, 11, 12, 13, 14, 15, 16, 17, 18, 19, 20, 21, 22, 23, 24, 25, 26, 27, 28, 29, 30, 31, 32, 33, 34, 35, 36, 37, 38, 39 or 40 or more nucleotides in length. In some cases, the portion of the gRNA that complements and binds the targeting region in the polynucleotide is between about 19 and about 21 nucleotides in length. In some cases, the gRNA may incorporate wobble or degenerate bases to bind target regions. In some cases, the gRNA can be altered to increase stability. For example, non-natural nucleotides, can be incorporated to increase RNA resistance to degradation. In some cases, the gRNA can be altered or designed to avoid or reduce secondary structure formation. In some cases, the gRNA can be designed to optimize G-C content. In some cases, G-C content is between about 40% and about 60% (e.g., 40%, 45%, 50%, 55%, 60%). In some cases, the binding region can contain modified nucleotides such as, without limitation, methylated or phosphorylated nucleotides

[0162] In some embodiments, the gRNA can be optimized for expression by substituting, deleting, or adding one or more nucleotides. In some cases, a nucleotide sequence that provides inefficient transcription from an encoding template nucleic acid can be deleted or substituted. For example, in some cases, the gRNA is transcribed from a nucleic acid operably linked to an RNA polymerase III promoter. In such cases, gRNA sequences that result in inefficient transcription by RNA polymerase III, such as those described in Nielsen et al., Science. 2013 Jun. 28:340(6140):1577-80, can be deleted or substituted. For example, one or more consecutive uracils can be deleted or substituted from the gRNA sequence. In some cases, if the uracil is hydrogen bonded to a corresponding adenine, the gRNA sequence can be altered to exchange the adenine and uracil. This “A-U flip” can retain the overall structure and function of the gRNA molecule while improving expression by reducing the number of consecutive uracil nucleotides.

[0163] In some embodiments, the gRNA can be optimized for stability. Stability can be enhanced by optimizing the stability of the gRNA:nuclease interaction, optimizing assembly of the gRNA:nuclease complex, removing or altering RNA destabilizing sequence elements, or adding RNA stabilizing sequence elements. In some embodiments, the gRNA contains a 5′ stem-loop structure proximal to, or adjacent to, the region that interacts with the gRNA-mediated nuclease. Optimization of the 5′ stem-loop structure can provide enhanced stability or assembly of the gRNA:nuclease complex. In some cases, the 5′ stem-loop structure is optimized by increasing the length of the stem portion of the stem-loop structure.

[0164] gRNAs can be modified by methods known in the art. In some cases, the modifications can include, but are not limited to, the addition of one or more of the following sequence elements: a 5′ cap (e.g., a 7-methylguanylate cap); a 3′ polyadenylated tail; a riboswitch sequence; a stability control sequence; a hairpin; a subcellular localization sequence; a detection sequence or label; or a binding site for one or more proteins. Modifications can also include the introduction of non-natural nucleotides including, but not limited to, one or more of the following: fluorescent nucleotides and methylated nucleotides.

[0165] Also described herein are expression cassettes and vectors for producing gRNAs in a host cell. The expression cassettes can contain a promoter (e.g., a heterologous promoter) operably linked to a polynucleotide encoding a gRNA. The promoter can be inducible or constitutive. The promoter can be tissue specific. In some cases, the promoter is a U6. H1, or spleen focus-forming virus (SFFV) long terminal repeat promoter. In some cases, the promoter is a weak mammalian promoter as compared to the human elongation factor 1 promoter (EF1A). In some cases, the weak mammalian promoter is a ubiquitin C promoter or a phosphoglycerate kinase 1 promoter (PGK). In some cases, the weak mammalian promoter is a TetOn promoter in the absence of an inducer. In some cases, when a TetOn promoter is utilized, the host cell is also contacted with a tetracycline transactivator. In some embodiments, the strength of the selected gRNA promoter is selected to express an amount of gRNA that is proportional to the amount of Cas9 or dCas9. The expression cassette can be in a vector, such as a plasmid, a viral vector, a lentiviral vector, etc. In some cases, the expression cassette is in a host cell. The gRNA expression cassette can be episomal or integrated in the host cell.

### Zinc-Finger Nucleases (ZFNs)

[0166] “Zinc finger nucleases” or “ZFNs” are a fusion between the cleavage domain of FokI and a DNA recognition domain containing 3 or more zinc finger motifs. The heterodimerization at a particular position in the DNA of two individual ZFNs in precise orientation and spacing leads to a double-strand break in the DNA. In some embodiments of the methods described herein, ZFNs may be used to inhibit the expression of one or more nuclear factors set forth in Table 1 or Table 2, i.e., by cleaving the polynucleotide encoding the protein.

[0167] In some cases, ZFNs fuse a cleavage domain to the C-terminus of each zinc finger domain. In order to allow the two cleavage domains to dimerize and cleave DNA, the two individual ZFNs bind opposite strands of DNA with their C-termini at a certain distance apart. In some cases, linker sequences between the zinc finger domain and the cleavage domain requires the 5′ edge of each binding site to be separated by about 5-7 bp. Exemplary ZFNs that may be used in methods described herein include, but are not limited to, those described in Umov et al., Nature Reviews Genetics, 2010, 11:636-646; Gaj et al., Nat Methods, 2012, 9(8):805-7; U.S. Pat. Nos. 6,534,261; 6,607,882; 6,746,838; 6,794,136; 6,824,978; 6,866,997; 6,933,113; 6,979,539; 7,013,219; 7,030,215; 7,220,719; 7,241,573; 7,241,574; 7,585,849; 7,595,376; 6,903,185; 6,479,626; and U.S. Application Publication Nos. 2003/0232410 and 2009/0203140.

[0168] ZFNs can generate a double-strand break in a target DNA, resulting in DNA break repair which allows for the introduction of gene modification. DNA break repair can occur via non-homologous end joining (NHEJ) or homology-directed repair (HDR). In HDR, a donor DNA repair template that contains homology arms flanking sites of the target DNA can be provided.

[0169] In some embodiments, a ZFN is a zinc finger nickase which can be an engineered ZFN that induces site-specific single-strand DNA breaks or nicks, thus resulting in HDR. Descriptions of zinc finger nickases are found, e.g., in Ramirez et al., Nucl Acids Res. 2012, 40(12):5560-8; Kim et al., Genome Res, 2012, 22(7):1327-33.

### TALENs

[0170] TALENS may also be used to inhibit the expression of one or more nuclear factors set forth in Table 1, Table 2, Table 3, Table 4, Table 5, Table 6, Table 7 or Table 8. “TALENs” or “TAL-effector nucleases” are engineered transcription activator-like effector nucleases that contain a central domain of DNA-binding tandem repeats, a nuclear localization signal, and a C-terminal transcriptional activation domain. In some instances, a DNA-binding tandem repeat comprises 33-35 amino acids in length and contains two hypervariable amino acid residues at positions 12 and 13 that can recognize one or more specific DNA base pairs. TALENs can be produced by fusing a TAL effector DNA binding domain to a DNA cleavage domain. For instance, a TALE protein may be fused to a nuclease such as a wild-type or mutated FokI endonuclease or the catalytic domain of FokI. Several mutations to FokI have been made for its use in TALENs, which, for example, improve cleavage specificity or activity. Such TALENs can be engineered to bind any desired DNA sequence.

[0171] TALENs can be used to generate gene modifications by creating a double-strand break in a target DNA sequence, which in turn, undergoes NHEJ or HDR. In some cases, a single-stranded donor DNA repair template is provided to promote HDR.

[0172] Detailed descriptions of TALENs and their uses for gene editing are found, e.g., in U.S. Pat. Nos. 8,440,431; 8,440,432; 8,450.471; 8,586,363; and 8,697,853; Scharenberg et al., Curr Gene Ther, 2013, 13(4):291-303; Gaj et al., Nat Methods, 2012, 9(8):805-7; Beurdeley et al., Nat Commun, 2013, 4:1762; and Joung and Sander, Nat Rev Mol Cell Biol, 2013, 14(1):49.

### Meganucleases

[0173] Meganucleases” are rare-cutting endonucleases or homing endonucleases that can be highly specific, recognizing DNA target sites ranging from at least 12 base pairs in length, e.g., from 12 to 40 base pairs or 12 to 60 base pairs in length. Meganucleases can be modular DNA-binding nucleases such as any fusion protein comprising at least one catalytic domain of an endonuclease and at least one DNA binding domain or protein specifying a nucleic acid target sequence. The DNA-binding domain can contain at least one motif that recognizes single- or double-stranded DNA. The meganuclease can be monomeric or dimeric.

[0174] In some embodiments of the methods described herein, meganucleases may be used to inhibit the expression of one or more nuclear factors set forth in Table 1, Table 2, Table 3, Table 4, Table 5, Table 6, Table 7 or Table 8 i.e., by cleaving in a target region within the polynucleotide encoding the nuclear factor. In some instances, the meganuclease is naturally-occurring (found in nature) or wild-type, and in other instances, the meganuclease is non-natural, artificial, engineered, synthetic, or rationally designed. In certain embodiments, the meganucleases that may be used in methods described herein include, but are not limited to, an I-CreI meganuclease, I-CeuI meganuclease, I-MsoI meganuclease, I-SceI meganuclease, variants thereof, mutants thereof, and derivatives thereof.

[0175] Detailed descriptions of useful meganucleases and their application in gene editing are found, e.g., in Silva et al., Curr Gene Ther, 2011, 11(1):11-27; Zaslavoskiy et al., BAC Bioinformatics, 2014, 15:191; Takeuchi et al., Proc Natl Acad Sci USA, 2014, 111(11):4061-4066, and U.S. Pat. Nos. 7,842,489; 7,897,372; 8,021,867; 8,163,514; 8,133,697; 8,021,867; 8,119,361; 8,119,381; 8,124,36; and 8,129,134.

### RNA-Based Technologies

[0176] Various RNA-based technologies may also be used in methods described herein to inhibit the expression of one or more nuclear factors set forth in Table 1, Table 2, Table 3, Table 4, Table 5, Table 6, Table 7 or Table 8. Examples of RNA-based technologies include, but are not limited to, small interfering RNA (siRNA), antisense RNA, microRNA (miRNA), and short hairpin RNA (shRNA)

[0177] RNA-based technologies may use an siRNA, an antisense RNA, a miRNA, or a shRNA to target a sequence, or a portion thereof, that encodes a transcription factor. In some embodiments, one or more genes regulated by a transcription factor may also be targeted by an siRNA, an antisense RNA, a miRNA, or a shRNA. An siRNA, an antisense RNA, a miRNA, or a shRNA may target a sequence comprising at least 10, at least 20, at least 30, at least 40, at least 50, at least 60, at least 70, at least 80, at least 90, or at least 100 contiguous nucleotides.

[0178] An siRNA may be produced from a short hairpin RNA (shRNA). A shRNA is an artificial RNA molecule with a hairpin turn that can be used to silence target gene expression via the siRNA it produces in cells. See, e.g., Fire et. al., Nature 391:806-811, 1998; Elbashir et al., Nature 411:494-498, 2001; Chakraborty et al., Mol Ther Nucleic Acids 8:132-143, 2017; and Bouard et al., Br. J. Pharmacol. 157:153-165, 2009. Expression of shRNA in cells is typically accomplished by delivery of plasmids or through viral or bacterial vectors. Suitable bacterial vectors include but not limited to adeno-associated viruses (AAVs), adenoviruses, and lentiviruses. After the vector has integrated into the host genome, the shRNA is then transcribed in the nucleus by polymerase II or polymerase III (depending on the promoter used). The resulting pre-shRNA is exported from the nucleus, then processed by a protein called Dicer and loaded into the RNA-induced silencing complex (RISC). The sense strand is degraded by RISC and the antisense strand directs RISC to an mRNA that has a complementary sequence. A protein called Ago2 in the RISC then cleaves the mRNA, or in some cases, represses translation of the mRNA, leading to its destruction and an eventual reduction in the protein encoded by the mRNA. Thus, the shRNA leads to targeted gene silencing.

[0179] The shRNA or siRNA may be encoded in a vector. In some embodiments, the vector further comprises appropriate expression control elements known in the art, including, e.g., promoters (e.g., inducible promoters or tissue specific promoters), enhancers, and transcription terminators.

### III. Methods of Treatment

[0180] Any of the methods described herein may be used to modify T cells in a human subject or obtained from a human subject. Any of the methods and compositions described herein may be used to modify T cells obtained from a human subject to treat or prevent a disease (e.g., cancer, an autoimmune disease, an infectious disease, transplantation rejection, graft vs. host disease or other inflammatory disorder in a subject).

[0181] Provided herein is a method of treating an autoimmune disorder in a subject, the method comprising administering a population of T cells comprising: (a) a genetic modification or heterologous polynucleotide that inhibits expression of a nuclear factor set forth in Table 1, Table 3, Table 6 or Table 8; and/or a (b) heterologous polynucleotide that encodes a nuclear factor set forth in Table 2, Table 4, Table 5 or Table 7, to a subject that has an autoimmune disorder.

[0182] In some embodiments, a T cell wherein expression of one or more nuclear factors selected from the group consisting of CBFB, MYB, ZNF217, FOXK1, FLI1, FOS, SATB1, IL2 and ATXN7L3 is inhibited, is administered to a subject having an autoimmune disorder.

[0183] In some embodiments, a T cell, for example, a regulatory T cell, wherein expression of one or more nuclear factors selected from the group consisting of ETS1. MYBL2, MYB, TP53, FLI1, SATB1, MBD2, ZBTB7A, DNMT1, TFDP1, SMARCB1 and MAF is inhibited, is administered to a subject having an autoimmune disorder.

[0184] In some embodiments, a T cell, for example, a conventional T cell, wherein expression of one or more nuclear factors selected from the group consisting of NFATC2, MAF, ZBTB7A, MBD2, GATA3, MED14, IRF2, MED30, ZBTB11, RELA, JAK3, MED111, BCL11B, MTF1, ATXN7L3, YY1, ETS1, IL2, DNMT1, GTF2B and SMARCB1 is inhibited, is administered to a subject having an autoimmune disorder.

[0185] In some embodiments, a T cell, for example, a conventional T cell, wherein expression of one or more nuclear factors selected from the group consisting of IKZF3, YY1, MBD2, IRF4, IKZF1, RXRB, RELA, ETS1, KMT2A, PTEN, JAK3, STAT5A, GATA3, FOXP1, STAT5B and IL2RA is inhibited, is administered to a subject having an autoimmune disorder.

[0186] In some embodiments, a T cell comprising a heterologous polynucleotide that encodes a nuclear factor selected from the group consisting of MTF1, RELA, IRF1, BCL11B, STAT3, MED30, MED14, MED11, IKZF3, KMT2A, IKZF1, MED12, TAF5L, PTEN. IRF4, FOXO1, FOXP1 and CTLA4 is administered to a subject having an autoimmune disorder.

[0187] In some embodiments, a T cell comprising a heterologous polynucleotide that encodes a nuclear factor selected from the group consisting of TAF5L, FOXP3, GATA3, STAT5B, FOXP1, STAT5A, PTEN and FOXO1 is administered to a subject having an autoimmune disorder.

[0188] In some embodiments, a T cell comprising a heterologous polynucleotide that encodes a nuclear factor selected from the group consisting of MED12, FOXP1, PTEN, IKZF1, TAF5L. PRDM1, TFDP1, CXXC1, IKZF3 and TP53 is administered to a subject having an autoimmune disorder.

[0189] In some embodiments, a T cell comprising a heterologous polynucleotide that encodes a nuclear factor selected from the group consisting of MED12, CBFB, HIVEP2, KLF2, MYB, FOXK1, ZNF217, IRF2, TNFAIP3, MYC, PRDM1, TFDP1, IRF1, FOXO1, ATXN7L3 or TP53 is administered to a subject having an autoimmune disorder.

[0190] Also provided is a method of treating cancer in a subject, the method comprising administering a population of T cells comprising a genetic modification or heterologous polynucleotide that inhibits expression of a nuclear factor set forth in Table 2, Table 4, Table 5 or Table 7 and/or a heterologous polynucleotide that encodes a nuclear factor set forth in Table 1, Table 3, Table 6 to a subject that has cancer.

[0191] In some embodiments, a T cell wherein expression of one or more nuclear factors selected from the group consisting of MTF1, RELA, IRF1, BCL11B, STAT3, MED30, MED14, MED11, IKZF3, KMT2A, IKZF1, MED12, TAF5L, PTEN, IRF4, FOXO1, FOXP1 and CTLA4 is inhibited, is administered to a subject having cancer.

[0192] In some embodiments, a T cell wherein expression of one or more nuclear factors selected from the group consisting of TAF5L, FOXP3, GATA3, STAT5B, FOXP1, STAT5A, PTEN and FOXO1 is inhibited, is administered to a subject having cancer.

[0193] In some embodiments, a T cell wherein expression of one or more nuclear factors selected from the group consisting of MED12, FOXP1, PTEN, IKZF1, TAF5L. PRDM1, TFDP1, CXXC1, IKZF3 and TP53 is inhibited, is administered to a subject having cancer.

[0194] In some embodiments, a T cell wherein expression of one or more nuclear factors selected from the group consisting of MED12, CBFB, HIVEP2, KLF2, MYB, FOXK1, ZNF217, IRF2, TNFAIP3, MYC, PRDM1. TFDP1, IRF1, FOXO1, ATXN7L3 and TP53, is inhibited, is administered to a subject having cancer or an autoimmune disorder. In some embodiments, inhibition of one or more nuclear factors that increase IL-2 in effector T cells, for example, one or more nuclear factors selected from the group consisting of MED12, CBFB, HIVEP2, KLF2, MYB, FOXK1, ZNF217, IRF2, TNFAIP3, MYC, PRDM1, TFDP1, IRF1, FOXO1, ATXN7L3 or TP53 can be used to treat cancer. In some embodiments, inhibition of one or more nuclear factors that increase IL-2 in regulatory T cells, for example, one or more nuclear factors selected from the group consisting of MED12, CBFB, HIVEP2. KLF2, MYB, FOXK1, ZNF217, IRF2, TNFAIP3, MYC, PRDM1, TFDP1, IRF1, FOXO1, ATXN7L3 or TP53 can be used to treat an autoimmune disorder.

[0195] In some embodiments, a T cell comprising a heterologous polynucleotide encoding a nuclear factor selected from the group consisting of CBFB, MYB, ZNF217, FOXK1, FLI1, FOS, SATB, IL2 and ATXN7L3 is administered to a subject having cancer or an autoimmune disorder. In some embodiments, inhibition of one or more nuclear factors that increase IL-2 in effector T cells, for example, inhibition of one or more factors selected from the group consisting of CBFB, MYB, ZNF217, FOXK1, FLI1, FOS, SATB1, IL2 and ATXN7L3, can be used to treat cancer in a subject. In some embodiments, inhibition of one or more nuclear factors that increase IL-2 in regulatory T cells, for example, inhibition of one or more factors selected from the group consisting of CBFB, MYB, ZNF217, FOXK1, FLI1, FOS, SATB1, IL2 and ATXN7L3, can be used to autoimmune disease in a subject.

[0196] In some embodiments, a T cell comprising a heterologous polynucleotide encoding a nuclear factor selected from the group consisting of ETS1, MYBL2, MYB, TP53, FLI1. SATB1, MBD2, ZBTB7A, DNMT1, TFDP1, SMARCB1 and MAF is administered to a subject having cancer.

[0197] In some embodiments, a T cell comprising a heterologous polynucleotide encoding a nuclear factor selected from the group consisting of NFATC2, MAF, ZBTB7A, MBD2, GATA3, MED14, IRF2, MED30, ZBTB11, RELA, JAK3, MED11, BCL11B, MTF1, ATXN7L3, YY1, ETS1, IL2, DNMT1, GTF2B and SMARCB1 is administered to a subject having cancer.

[0198] In some embodiments, a T cell comprising a heterologous polynucleotide encoding a nuclear factor selected from the group consisting of IKZF3, YY1, MBD2, IRF4, IKZF1. RXRB, RELA, ETS1, KMT2A, PTEN, JAK3, STAT5A, GATA3, FOXP1, STAT5B is administered to a subject having cancer.

[0199] Provided herein is a method of treating cancer in a human subject comprising: a) obtaining T cells from the subject; b) modifying the T cells using any of the methods provided herein; and c) administering the modified T cells to the subject, wherein the human subject has cancer.

[0200] In some embodiments, the method for treating cancer comprises method comprises: a) obtaining T cells from the subject; b) modifying the T cells by inhibiting expression of one or more nuclear factors selected from the group consisting of MTF1, RELA, IRF1, BCL11B, STAT3, MED30, MED14, MED11, IKZF3, KMT2A, IKZF1, TAF5L, IRF4, FOXP1, CTLA4, FOXP3, GATA3, STAT5B, STAT5A, PTEN, FOXO1, MED12. FOXP1, PTEN, IKZF1, TAF5L, PRDM1, TFDP1, CXXC1, IKZF3, TP53, CBFB, HIVEP2, KLF2, MYB, FOXK1, ZNF217, IRF2, TFNAIP3, MYC, PRDM1, TFDP1, IRF1, ATXN7L3 and TP53; and c) administering the T cells to the subject.

[0201] In some embodiments, the method for treating cancer comprises: a) obtaining T cells from the subject; b) modifying the T cells by overexpressing one or more nuclear factors selected from the group consisting of CBFB, MYB, ZNF217, FOXK1, FLI1, FOS, IL2, ATXN7L3, ETS1, MYBL2, MYB, TP53, FLI1, SATB1, ZBTB7A, DNMT1, TFDP1, SMARCB1, MAF, NFATC2, MAF, ZBTB7A, MED14, IRF2, MED30, ZBTB11, MED11, BCL11B, MTF1, ATXN7L3, YY1, ETS1, IL2. DNMT1, GTF2B, IKZF3, MBD2, IRF4, IKZF1, RXRB, RELA, ETS1, KMT2A, PTEN, JAK3, STAT5A, GATA3, FOXP1, STAT5B and IL2RA; and c) administering the T cells to the subject.

[0202] Also provided herein is a method of treating an autoimmune disease in a human subject comprising: a) obtaining T cells from the subject; b) modifying the T cells using any of the methods provided herein; and c) administering the modified T cells to the subject, wherein the human subject has an autoimmune disease.

[0203] In some embodiments, the method for treating autoimmune disease comprises a) obtaining T cells from the subject; b) modifying the T cells by inhibiting expression of one or more nuclear factors selected from the group consisting of CBFB, MYB, ZNF217, FOXK1, FLI1, FOS, IL2, ATXN7L3, ETS1, MYBL2, MYB, TP53, FLI1, SATB1, ZBTB7A, DNMT1, TFDP1, SMARCB1, MAF, NFATC2, MAF, ZBTB7A, MED14, IRF2, MED30, ZBTB11, MED11, BCL11B, MTF1, ATXN7L3, YY1, ETS1, IL2, DNMT1. GTF2B. IKZF3. MBD2, IRF4, IKZF1, RXRB, RELA, ETS1, KMT2A, PTEN, JAK3, STAT5A, GATA3, FOXP1, STAT5B and IL2RA; and c) administering the T cells to the subject.

[0204] In some embodiments, the method for treating an autoimmune disorder comprises: a) obtaining T cells from the subject; b) modifying the T cells by overexpressing one or more nuclear factors selected from the group consisting of MTF1, RELA, IRF1, BCL11B, STAT3, MED30, MED14, MED11, IKZF3, KMT2A, IKZF1, TAF5L, IRF4, FOXP1, CTLA4, FOXP3, GATA3, STAT5B, STAT5A, PTEN, FOXO1, MED12, FOXP1, PTEN, IKZF1, TAF5L, PRDM1, TFDP1, CXXC1, IKZF3, TP53, CBFB, HIVEP2, KLF2, MYB, FOXK1, ZNF217, IRF2, TFNAIP3, MYC, PRDM1, TFDP1, IRF1, ATXN7L3 and TP53; and c) administering the T cells to the subject.

[0205] In some embodiments, T cells obtained from a cancer subject may be expanded ex vivo. The characteristics of the subject's cancer may determine a set of tailored cellular modifications (i.e., which nuclear factors from Table 1, Table 2, Table 3, Table 4, Table 5, Table 6, Table 7, Table 8, Table 9, Table 10, Table 11, Table 12, Table 13 and/or Table 14 to target), and these modifications may be applied to the T cells using any of the methods described herein. Modified T cells may then be reintroduced to the subject. This strategy capitalizes on and enhances the function of the subject's natural repertoire of cancer specific T cells, providing a diverse arsenal to eliminate mutagenic cancer cells quickly. Similar strategies may be applicable for the treatment of autoimmune diseases.

[0206] In other cases, T cells in a subject can be targeted for in vivo modification. See, for example, See, for example, U.S. Pat. No. 9,737,604 and Zhang et al. “Lipid nanoparticle-mediated efficient delivery of CRISPR/Cas9 for tumor therapy.” NPG Asia Materials Volume 9, page e441 (2017).

[0207] Disclosed are materials, compositions, and components that can be used for, can be used in conjunction with, can be used in preparation for, or are products of the disclosed methods and compositions. These and other materials are disclosed herein, and it is understood that when combinations, subsets, interactions, groups, etc. of these materials are disclosed that while specific reference of each various individual and collective combinations and permutations of these compounds may not be explicitly disclosed, each is specifically contemplated and described herein. For example, if a method is disclosed and discussed and a number of modifications that can be made to one or more molecules including in the method are discussed, each and every combination and permutation of the method, and the modifications that are possible are specifically contemplated unless specifically indicated to the contrary. Likewise, any subset or combination of these is also specifically contemplated and disclosed. This concept applies to all aspects of this disclosure including, but not limited to, steps in methods using the disclosed compositions. Thus, if there are a variety of additional steps that can be performed, it is understood that each of these additional steps can be performed with any specific method steps or combination of method steps of the disclosed methods, and that each such combination or subset of combinations is specifically contemplated and should be considered disclosed.

[0208] Publications cited herein and the material for which they are cited are hereby specifically incorporated by reference in their entireties.

### EXAMPLES

[0209] The following examples are provided by way of illustration only and not by way of limitation. Those of skill in the art will readily recognize a variety of non-critical parameters that could be changed or modified to yield essentially the same or similar results.

### Example 1

### Materials and Methods

Buffers/media
cRPMI

| | Stock | | | Final | | | |
|---|---|---|---|---|---|---|---|
| Name | Concentration | | Purpose | Concentration | | Source | Cat No |
| Media | N/A | | Support cells in | N/A | | Sigma | R0883 |
| (1640 RPMI) | | | suspension culture | | | | |
| FCS | N/A | | Growth | 10% | | Sigma | F0926 |
| | | | promotion/survival | | | | |
| | | | enhancement | | | | |
| Penicillin- | 10,000 | U/mL | Prevention of bacterial | 100 | U/mL | Gibco | 15140-122 |
| Streptamycin | | | contamination | | | | |
| L-Glutamine | 200 | mM | Energy source | 1% | (2 mM) | Sigma | G7513 |
| HEPES | 1M, pH 7.0- | | organic zwitterionic | 1% | (10 mM) | Sigma | H0887 |
| | 7.6 | | buffering agent | | | | |
| MEM Non- | 100X | | Increase cell | 1% | (1X) | Gibco | 11140-050 |
| essential Amino | | | growth/viability | | | | |
| Acids | | | | | | | |
| Sodium | 100 | mM | Carbon source | 1% | (1 mM) | Gibco | 11360-070 |

Pyruvate

X-VIVO 15 Serum-Free Hematopoietic Cell Medium

| | Stock | | Final | | | |
|---|---|---|---|---|---|---|
| Name | Concentration | Purpose | Concentration | | Source | Cat No |
| Media | N/A | Support cells in | N/A | | Lonza | 04-418Q |
| (X-VIVO 15*) | | suspension culture | | | | |
| FCS | N/A | Growth | 5% | | Sigma | F0926 |
| | | promotion/survival | | | | |
| | | enhancement | | | | |
| N-acetyl L-cysteine | 1-10M | NAC is an | 10 | mM | Sigma | A9165 |
| | (diluted in | antioxidant | | | | |
| | ddH₂O) | molecule that inhibit | | | | |
| | | ROS activity by | | | | |
| | | scavenging activity. | | | | |
| 2-mercaptoethanol | 55 mM | A thiol compound, | 55 | uM | Gibco | 21985023 |

| | |
|---|---|
| (β-me) | commonly used as a |
| | reducing agent in |
| | organic reactions |

Complete DMEM:

| | Stock | | | Final | | | |
|---|---|---|---|---|---|---|---|
| Name | Concentration | | Purpose | Concentration | | Source | Cat No |
| DMEM high | N/A | | Cell media | N/A | | UCSF | CCFAA005 |
| glucose | | | | | | CCF | |
| FCS | N/A | | Growth | 10% | | Sigma | F0926 |
| | | | promotion/survival | | | | |
| | | | enhancement | | | | |
| Penicillin- | 10,000 | U/mL | Prevention of bacterial | 100 | U/mL | Gibco | 15140-122 |
| Streptamycin | | | contamination | | | | |
| L-Glutamine | 200 | mM | Energy source | 1% | (2 mM) | Sigma | G7513 |
| HEPES | 1M, pH 7.0- | | organic zwitterionic | 1% | (10 mM) | Sigma | H0887 |
| | 7.6 | | buffering agent | | | | |
| MEM Non- | 100X | | Increase cell | 1% | (1X) | Gibco | 11140-050 |
| essential Amino | | | growth/viability | | | | |
| Acids | | | | | | | |
| Sodium | 100 | mM | Carbon source | 1% | (1 mM) | Gibco | 11360-070 |

Pyruvate

Fluorescence- activated cell sorting (FACS) buffer

| | Stock | | Final | | |
|---|---|---|---|---|---|
| Name | Concentration | Purpose | Concentration | Source | Cat No |
| PBS | N/A | Support cells in suspension | N/A | Sigma | R0883 |
| | | culture | | | |
| FCS | N/A | Protein Carrier to reduce | 2% | Sigma | F0926 |
| | | nonspecific antibody binding | | | |
| EDTA | 0.5M, pH 8.0 | Chealator (prevents cell | 1 mM | Gibco | 15140-122 |
| | | clumping) | | | |

Pooled sgRNA Library Construction

[0210] We selected transcription factors (TFs) with known or inferred motifs from Lambert et al (Lambert et al., “The human transcription factors,” Cell 172(4): 650-665 (2018)), non-target controls from the Brunello sgRNA library (Doench et al., 2016) and several immune genes of interest from the lab. All sgRNA sequences were from the Brunello sgRNA library (Doench et al., “Optimized sgRNA design to maximize activity and minimize off-target effects of CRISPR-Cas9,” Nat Biotechnol 34(2): 184-192 (2016)). In total we included 1349 genes with an average of 4 guides per gene, 13 guides against GFP as a positive control for editing, and 593 non-targeting controls. Following the custom sgRNA library cloning protocol as described by Joung et al. (Joung et al., “Genome-scale CRISPR-Cas9 knockout and transcriptional activation screening,” Nat Protoc 12(4): 828-863 (2017)), we integrated our TF sgRNA library into the LRG2.1 backbone (Addgene, plasmid #108098) based off data from the study by Grevet et al. (Grevet et al., “Domain-focused CRISPR screen identifies HRI as a fetal hemoglobin regulator in human erythroid cells,” Science 361(6399): 285-290 (2018)). Our pooled oligo library was ordered from Twist Bioscience with flanking sequences allowing for integration into the LRG2.1 backbone using NEBuilder HiFi DNA Assembly master mix (NEB, Cat #E2621X) according to the manufacturer's protocol. We used Endura ElectroCompetent Cells to amplify the TF library per the manufacturer's protocol (Endura, Cat #60242-1).

### Lentiviral Production

[0211] HEK 293T cells were seeded at 14 million cells in a 15 cm tissue culture treated culture dish (Corning, Cat #430599) in Opti-MEM 24 hours prior to transfection. Using Lipofectamin 3000 (Lifetech, Cat #L3000075) according to the manufacturer's protocol, cells were transfected with the sgRNA transfer plasmid, and two lentiviral packaging plasmids, pMD2.G (Addgene, Cat #12259) and psPAX2 (Addgene, Cat #12260). Cells were incubated for 5 hours at 37° C., after which time the transfection media was removed and replaced with fresh Opti-MEM containing ViralBoost at 1× (Alstem, Cat #VB100). Cells were returned to the incubator for 24 hours after which time the viral supernatant was collected and spun down at 300 g for 5 minutes to remove cellular debris. The supernatant was then passed through a 0.45-μm filter, and subsequently mixed with one volume of cold Lentivirus Precipitation Solution (Alstem, Cat #VC125) at 4° C. to every 4 volumes of lentivirus-containing supernatant. Samples were mixed well and placed at 4° C. overnight. The virus was then concentrated by centrifugation at 1500 g for 30 minutes at 4° C., after which the supernatant was discarded, and the residual sample underwent additional centrifugation at 1500 g for 5 minutes to remove any residual supernatant. The viral pellet was then resuspended at a ratio of 1:100 of the original volume using PBS (Fisher Scientific, Cat #10010049) at 4° C. Virus was then stored until use at −80° C.

### Isolation, Culture and Expansion of Human CD4+T-Effector Cells and CD4+CD127lowCD25+ Regulatory T Cells for Screening Experiments

[0212] Primary human T cells were obtained from residuals from ***leukoreduction chambers after apheresis (Blood Centers of the Pacific) for experiments not involving RNA-Seq or high throughput amplicon sequencing. For sequencing experiments, primary human T cells were obtained from whole blood donors through a protocol approved by the UCSF Committee on Human Research (CHR #13-11950). Peripheral blood mononuclear cells (PBMCs) were isolated by size separation using Lymphoprep (STEMCELL, Cat #07861) in SepMate tubes (STEMCELL, Cat #85460), according to the manufacturer's protocol. Isolated PBMCs were then subjected to antibody mediated magnetic separation to isolate either CD4+CD127lowCD25+ effector T cells or CD4+CD127lowCD25+ regulatory T cells. In order to ensure that out CD4+ population did not also contain CD4+CD127lowCD25+ regulatory T cells, we utilized the CD4+ negative isolation protocol from the StemCell EasySep™ Human CD4+CD127lowCD25+ Regulatory T Cell Isolation Kit (Catalog #18063). This same kit was used when CD4+CD127lowCD25+ regulatory T cells were desired. Effector T cells were cultured in cRPMI, while Regulatory T cells were cultured in X-Vivo (formulations above). After isolation, cells were stimulated with Immunocult Human CD3/CD28/CD2 T Cell Activator (STEMCELL, Cat #10970) at 6.25 uL per 1E6 cells, with IL-2 (Amerisource Bergen, Cat #10101641) at 50 U/mL for effector T cells and 300 U/mL for regulatory T cells, at a concentration of 1E6 cells/mL.

### Regulatory T Cell Expansion

[0213] In order to achieve the necessary number of cells to maintain power in the results of the screen, regulatory T cells needed to undergo a period of expansion and restimulation prior to lentiviral transduction and Cas9 electroporation. Five days after the initial isolation and stimulation as described above, cells were passaged and subsequently cultured at 2.5E5 cells/mL in XVIVO containing 300 U/mL human IL-2. After an additional 4 days (9 days from initial stimulation), cells were restimulated with 6.25 uL of Immunocult per million cells as previously described. These cells underwent lentiviral transduction and Cas9 electroporation as described below according to the same schedule as effector T cells.

### Lentiviral Transduction and Cas9 Electroporation

[0214] Twenty-four hours post stimulation, lentivirus containing the TF library was added directly to cultured T cells in a drop-wise fashion and tilting the plates to distribute evenly, targeting a multiplicity of infection (MOI) of 0.4 (Ellis & Delbralck, “The growth of bacteriophage,” J Gen Physiol 22(3): 365-384 (1939)). After an additional 24 hours, excess lentivirus was removed from the supernatant and washed off the cells by collecting the cells as a single cell suspension in a 50 mL conical, centrifuging at 300 g, discarding the supernatant, and resuspending the cells in fresh media (cRPMI or X-vivo if effector T cells or regulatory T cells, respectively). Cells were then incubated at 37° C.

### Cas9-Ribonucleotide Protein (RNP) Preparation

[0215] Cas9 protein (MacroLab, Berkeley, 40 μM stock) was delivered into the cells using a modified Guide Swap technique (Ting P Y, et al., “Guide Swap enables genome-scale pooled CRISPR-Cas9 screening in human primary cells,” Nat Methods 15(11): 941-946 (2018). To do this, on the day of electroporation, lyophilized Dharmacon Edit-R crRNA Non-targeting Control #3 (Dharmacon, Cat #U-007503-01-05) and Dharmacon Edit-R CRISPR-Cas9 Synthetic tracrRNA (Dharmacon, Cat #U-002005-20) were resuspended at a stock concentration of 160 mM in 10 mM Tris-HCl (pH 7.4) with 150 mM KCl. They were mixed at a 1:1 ratio, creating an 80 mM solution, and incubated on a heat block at 37° C. for minutes. Single-stranded donor oligonucleotides (ssODN; sequence: TTAGCTCTGTTTACGTCCCAGCGGGCATGAGAGTAACAAGAGGGTGTGGTAATAT TACGGTACCGAGCACTATCGATACAATATGTGTCATACGGACACG) (SEQ ID NO: 2573) was then added at a 1:1 molar ratio of the final Cas9-Guide complex, and mixed well by pipetting. The solution was incubated for an additional 5 minutes at 37° C. on the heat block. Cas9 was then added slowly at a 1:1 volume to volume ratio, taking care to avoid precipitation, pipetting up and down several times to ensure complete resuspension of the RNP complex, and incubated at 37° C. for 15 minutes completing the process of creating the assembled RNP-ssODN complex.

### Electroporation

[0216] Following 24 hours after residual virus was washed from the culture, cells were centrifuged at 100 g for 10 minutes to pellet them, and resuspended in room temperature Lonza P3 electroporation buffer (Lonza, Cat #V4XP-3032) at 1-2E6 cells per 17.8 μL. 7.2 μL of the RNP-ssODN complex were added for every 17.8 μL of cells and mixed well. Using a multichannel pipette, 23 uL of the cells-RNP-ssODN mixture were added per well to a 96 well electroporation cuvette plate (Lonza, Cat #VVPA-1002), and nucleofected using the pulse code EH-115. Immediately after electroporation, 90 μL of prewarmed media were added to each well and incubated at 37° C. for 15 minutes. Cells were then pooled, transferred to incubation flasks, and diluted with pre-warmed media to a final concentration of 1E6 cells/mL and incubated at 37° C. Cells were passaged at 48 hours post electroporation, and subsequently maintained in culture at 1E6 cells/mL.

### Screen Phenotyping and Cell Sorting

[0217] Cells were screened 6 days following electroporation. 10-20E⁶ cells were portioned off and sorted based on GFP expression only. The remaining cells were sorted based on GFP positivity, as well as a target phenotype using an APC fluorescent antibody targeting either CD25 (Tonbo, Cat #20-0259-T100), IL-2 (Biolegend, Cat #500310), CTLA-4 (Biolegend, Cat #349908), or Foxp3 (eBiosciences, Cat #17-4777-42). Cells sorted for CD25 underwent surface staining according to the manufacturer's protocol. Cells sorted for IL-2 were treated with Cell Activation Cocktail with Brefeldin A (Biolegend, Cat #423304) for 4 hours prior to fixation, and were fixed using the CD Cytofix/Cytoperm kit (Becton Dickinson, Cat #554714) according to the manufacturer's protocol. Cells sorted for CTLA-4 were treated with Cell Activation Cocktail without Brefeldin A (Biolegend, Cat #423302) for 4 hours prior to fixation, and were fixed using the Foxp3 Fix/Perm buffer set (Biolegend, Cat #421403) according to the manufacturer's protocol. Cells sorted for Foxp3 were fixed using the True-Nuclear Transcription Factor buffer set (Biolegend, Cat #424401) according to the manufacturer's protocol. Cells were sorted using a BD FACS Aria II.

### Genomic DNA Extraction and Preparation for Next Generation Sequencing

[0218] After sorting, cells were washed with PBS, counted, pelleted, and resuspending at up to 5E6 cells per 400 μl of ChIP lysis buffer (1% SDS, 50 mM Tris, pH 8, 10 mM EDTA). The remaining protocol reflects additives/procedures performed on each 400 μl sample. 16 μl of NaCl (5M) was added, and the sample was incubated on a heat block overnight at 66° C. The next morning, 8 μl of RNAse A (10 mg/ml, resuspended in ddH-20) (Zymo, Cat #E1008) was added, and the sample was vortexed briefly, and incubated at 37° C. for 1 hour. Next, 8 μl of Proteinase K (20 mg/ml) (Zymo, Cat #D3001) was added, the sample was vortexed briefly, and incubated at 55° C. for 1 hour. A phase lock tube (Quantabio, Cat #2302820) was prepared for each sample by spinning down the gel to the bottom of the tube at 20,000 g for 1 minute, after which 400 μl of Phenol:Chloroform:Isoamyl Alcohol (25:24:1) was added to each tube. 400 μl of the sample was then added to the phase lock tube, which was then shaken vigorously. The sample was then centrifuged at maximum speed at room temperature for 5 minutes. The aqueous phase was transferred to a low-binding eppendorf tube (Eppendorf, Cat #022431021) to which was added 40 μl of Sodium Acetate (3M). 1 μl GlycoBlue and 600 μl of isopropanol at room temperature. The sample was then vortexed and stored at −80° C. for 30 minutes or until the sample had frozen solid. Next the sample was centrifuged at maximum speed at 4° C. for 30 minutes, the pellet was washed with fresh 70% room temperature Ethanol, and allowed to air dry for 15 minutes. Pellets were then resuspended in Zymo DNA elution buffer (Zymo, Cat No: D3004-4-10), and placed on the heat block at 65° C. for 1 hour to completely dissolve the genomic DNA.

[0219] sgRNA was amplified and barcoded from the genomic DNA according to the protocol by Joung et al. (Joung et al., 2017). Up to 2.5 μg of genomic DNA were added to each 50 μL reaction, which included 25 μL of NEBNext Ultra II Q5 master mix (NEB, Cat #M0544L), 1.25 μL of the 10 μM forward primer (AATGATACGGCGACCACCGAGATCTACAC GCTTTATATATCTTGTGGAAAGGACGAAACACC) (SEQ ID NO: 2574), and 1.25 μL of the 10 μM reverse primer (CAAGCAGAAGACGGCATACGAGAT) (SEQ ID NO: 2575) i7 index (GTGACTGGAGTTCAGACGTGctttgctgtttccagcaaagttgataacg) (SEQ ID NO: 2576), with the remaining volume as water. PCR cycling conditions were: 98° C. for 3 minutes, followed by 23 cycles at 98° C. for 10 seconds. 63° C. for 10 seconds, and 72° C. for 25 seconds, and ending with 2 minutes at 72° C. Samples were then cleaned and concentrated in Zymo Spin-V columns (Zymo, Cat #C1016-50) following Joung et al., and eluted in 150 μL of Zymo DNA elution buffer. Up to 2 μg of each library were loaded on a 2% agarose gel, and the band at ˜250 base pairs was extracted using the Zymoclean Gel DNA recovery kit (Zymo, Cat #D4008). The concentration of each sample was then measured using the Qubit dsDNA high sensitivity assay kit (Thermo Fisher Scientific. Cat #Q32854). Samples were then sequenced on an Illumina HiSeq 4000 using 10-30% PhiX (Illumina, Cat #15017872), and a custom primer (sequence: CCGAGATCTACACGCTTTATATATCTTGTGGAAAGGACGAAACACC) (SEQ ID NO: 2576).

### Arrayed Validation Isolation, Culture, and Electroporation

[0220] Based on the screen results, we chose to pursue the top two performing guides for 60 target genes (including 4 NTCs per plate). Guides were selected both for their overlap across screens, as well as some that were unique to only a single screen. The complete guide list can be found in supplemental table ***. Primary human T cells were obtained from whole blood donors through a protocol approved by the UCSF Committee on Human Research (CHR #13-11950), isolated and stimulated as described above. Custom crRNA plates were ordered from Dharmacon, and were assembled as RNP-ssODN complexes as described above. 48 hours after stimulation, cells were counted, pelleted, and resuspended in room temperature Lonza P3 buffer (Lonza. Cat #V4XP-3032) at 1E6 cells per 20 μL. These were then mixed with 100 pmol of RNP each mixed well, and transferred to a 96 well electroporation cuvette plate (Lonza, Cat #VVPA-1002), and nucleofected using the pulse code EH-115. After electroporation, 90 μL of pre-warmed media was immediately added to each well and plates were incubated at 37° C. for 15 minutes. Wells were then split to a target culture population of 1E6 cells/mL filling all edge wells in the 96-well plate with PBS in order to avoid edge-effects (*** reference), and incubated at 37° C.

### Arrayed Validation Phenotyping Using Flow Cytometry and Genotyping

[0221] Arrayed validation plates were phenotyped at 3, 5, and 7 days after electroporation using the sample protocol and materials as outlined in the screen in a 96-well plate format. Cells were checked for expression of CD25 (Tonbo, Cat #20-0259-T100), IL-2 (Biolegend, Cat #500310), CTLA-4 (Biolegend, Cat #349908), or Foxp3 (eBiosciences, Cat #17-4777-42) using an Attune NxT Flow Cytometer with a 96-well plate-reader.

[0222] On day 5 post-electroporation, genomic DNA was isolated from each sample using DNA QuickExtract (Lucigen, Cat #QE09050) according to the manufacturer's protocol. Custom forward and reverse primers were ordered from IDT (Supplementary table ***). Amplicons containing CRISPR edit sites were generated by adding 1.25 μL each of forward and reverse primer at 10 nM to 5 μL of sample in QuickExtract, 12.5 μL of NEBNext Ultra II Q5 master mix (NEB, Cat #M0544L), and water to a total 25 μL reaction volume. The PCR cycling conditions were 98° C. for 3 minutes, 15 cycles of 94° C. for 20 seconds followed by 65° C.-57.5° C. for 20 seconds (0.5° C. incremental decreases per cycle), and 72° C. for 1 minute, and a subsequent 20 cycles at 94° C. for 20 seconds, 58° C. for 20 seconds and 72° C. for 1 minute, and a final 10 minute extension at 72° C. Samples were then diluted 1:200 and subsequently indexed using primers listed in Supplemental Table ***. Indexing reactions included 1 μL of the diluted sample, 2.5 μL of each the forward and reverse indexing primers at 10 μM each, 12.5 μL of NEB Q5 master mix, and water to a total 25 μL reaction volume. The indexing PCR cycling conditions were 98° C. for 30 seconds, followed by 98° C. for 10 seconds, 60° C. for 30 seconds, and 72° C. for 30 seconds for 12 cycles, and a final extension period at 72° C. for 2 minutes. Samples were quantified in a 96-well plate reader using the Quant-IT DNA high sensitivity assay kit (Invitrogen, Cat #Q33232) according to the manufacturer's protocol. Post pooling, samples were then SPRI purified, and quantified using an Agilent 4200 TapeStation. Samples were then sequenced on an Illumina MiniSeq with PE 300 reads.

### Quantification and Statistical Analysis

### Analysis of Pooled Screens

[0223] Counts for sgRNA libraries were generated using the count command in MAGeCK version 0.5.8 (mageck count—norm-method none). High outlier counts were filtered out before calculating differentially enriched sgRNAs between the low and high bins using the mageck test command (mageck test-k countfile-t low_rep1,low_rep2-c high_rep1,high_rep2—sort-criteria pos). We used an FDR <0.05 as a cutoff to call significantly differentially enriched sgRNAs.

### Analysis of Arrayed Validation

[0224] Cells were gated on lymphocytes and singlets in FlowJo Version and fluorescence area for each stain was exported to csv files. Fluorescence data was imported into R version 3.6.0. The median fluorescence across 4 non-targeting controls was calculated per donor per plate and the fluorescence of each well on the plate was normalized to the median control fluorescence.

### Results

[0225] As shown in FIG. 1, SLICE was used to identify nuclear factors that modulate expression of CTLA4, IL-2, IL2RA and FOXP3 in T cells. As shown in FIG. 2 an arrayed Cas9 ribonucleoprotein (RNP) approach was used to individually knock out transcription factor hits from SLICE Flow-Seq screens.

[0226] As shown in FIGS. 3A-3D transcription factors that regulate protein levels of four key immune genes IL2RA (FIG. 3A), IL-2 (FIG. 3B), CTLA4 (FIG. 3C) and FOXP3 (FIG. 3D) were discovered using SLICE Flow-Seq. These transcription factors are also listed in Tables 1-8. Cells were stained for the target of interest, sorted into high and low expression bins using fluorescent activated cell sorting, and the guide RNAs in each bin were sequenced. Red points highlight transcription factors that are significantly differently enriched between the high and low bins. Each dot represents the signal across four independent guide RNAs targeting that transcription factor.

[0227] As shown in FIGS. 4A-4C show there was a high degree of overlap between hits from the four screens. The hits from each screen were validated via flow cytometery. FIGS. 5A-5D show flow cytometry validation of screen hits following RNP knockout. Cells were stained for the target of interest (IL2RA (FIG. 5A), IL-2 (FIG. 5B), CRLA4 (FIG. 5C) and FOXP3 (FIG. 5D)) and analyzed using flow cytometry. Median fluorescent intensity was normalized to four non-targeting controls per donor. Points are colored based on two independent guide RNAs. Points show the median of 3 biological donors and error bars show the range.

[0228] As shown in FIG. 6, numerous cell type-specific transcription factors that regulate the protein levels of IL2RA were discovered using SLICE Flow-Seq in effector T cells vs. regulatory T cells. Effector and regulatory T cells were stained for IL2RA, sorted into high and low expression bins using fluorescent activated cell sorting, and the guide RNAs in each bin were sequenced.

[0229] In summary, SLICE Flow-Seq identified 40-60 transcription factors per target that regulate protein levels of IL2RA, IL-2, CTLA4 and FOXP3.

### Example 2

### Validation Studies

### Arrayed Validation Isolation, Culture, and Electroporation

[0230] Based on the screen results, the top two performing guides for 57 target genes (including 4 non-targeting controls per plate) were chosen. Primary human T cells were obtained from whole blood donors through a protocol approved by the UCSF Committee on Human Research (CHR #13-11950), isolated and stimulated as described below. Custom crRNA plates were ordered from Dharmacon, and were assembled as RNP-ssODN complexes as described below. 48 hours after stimulation, cells were counted, pelleted, and resuspended in room temperature Lonza P3 buffer (Lonza, Cat #V4XP-3032) at 1E⁶ cells per 20 μL. Cells were then mixed with 100 pmol of RNP, transferred to a 96 well electroporation cuvette plate (Lonza, Cat #VVPA-1002), and nucleofected using the pulse code EH-115. After electroporation, 90 μL of pre-warmed media was immediately added to each well and plates were incubated at 37° C. for 15 minutes. Wells were then split to a target culture population of 1E¹ cells/mL filling all edge wells in the 96-well plate with PBS in order to avoid edge-effects and incubated at 37° C.

### Arrayed Validation Phenotyping Using Flow Cytometry and Genotyping

[0231] Arrayed validation plates were phenotyped at 5 days after electroporation using the sample protocol and materials as outlined in the screen in a 96-well plate format. Cells were checked for expression of IL2RA (CD25) (Tonbo, Cat #20-0259-T100), IL-2 (Biolegend, Cat #500310), or CTLA-4 (Biolegend, Cat #349908) using an Attune NxT Flow Cytometer with a 96-well plate-reader.

[0232] On day 5 (sgRNA #1 Donor 1-3) or day 7 (sgRNA #2 Donor 1, 3) post-electroporation, genomic DNA was isolated from each sample using DNA QuickExtract (Lucigen, Cat #QE09050) according to the manufacturer's protocol. Custom forward and reverse primers were ordered from IDT. Amplicons containing CRISPR edit sites were generated by adding 1.25 μL each of forward and reverse primer at 10 nM to 5 μL of sample in QuickExtract, 12.5 μL of NEBNext Ultra 11 Q5 master mix (NEB, Cat #M0544L), and water to a total 25 μL reaction volume. The PCR cycling conditions were 98° C. for 3 minutes. 15 cycles of 94° C. for 20 seconds followed by 65° C.-57.5° C. for 20 seconds (0.5° C. incremental decreases per cycle), and 72° C. for 1 minute, and a subsequent 20 cycles at 94° C. for 20 seconds, 58° C. for 20 seconds and 72° C. for 1 minute, and a final 10 minute extension at 72° C. Samples were then diluted 1:200 and subsequently indexed using primers. Indexing reactions included 1 μL of the diluted sample, 2.5 μL of each the forward and reverse indexing primers at 10 μM each, 12.5 μL of NEB Q5 master mix, and water to a total 25 μL reaction volume. The indexing PCR cycling conditions were 98° C. for 30 seconds, followed by 98° C. for 10 seconds, 60° C. for 30 seconds, and 72° C. for 30 seconds for 12 cycles, and a final extension period at 72° C. for 2 minutes. Samples were quantified in a 96-well plate reader using the Quant-IT DNA high sensitivity assay kit (Invitrogen, Cat #Q33232) according to the manufacturer's protocol. Post pooling, samples were then SPRI purified, and quantified using an Agilent 4200 TapeStation. Samples were then sequenced on an Illumina MiniSeq with PE 300 reads.

### Pooled CRISPR Screen

### Lentiviral Transduction

[0233] Twenty-four hours post stimulation, lentivirus containing the TF library was added directly to cultured T cells in a drop-wise fashion and tilting the plates to distribute evenly, targeting a multiplicity of infection (MOI) of 0.4. After an additional 24 hours, excess lentivirus was removed from the supernatant and washed off the cells. Cells were then incubated at 37° C.

### Cas9-Ribonucleotide Protein (RNP) Preparation

[0234] Cas9 protein (MacroLab, Berkeley, 40 μM stock) was delivered into the cells using a modified Guide Swap technique (Ting P Y, et al. 2018). To do this, on the day of electroporation, lyophilized Dharmacon Edit-R crRNA Non-targeting Control #3 (Dharmacon, Cat #U-007503-01-05) and Dharmacon Edit-R CRISPR-Cas9 Synthetic tracrRNA (Dharmacon, Cat #U-002005-20) were resuspended at a stock concentration of 160 mM in 10 mM Tris-HCl (pH 7.4) with 150 mM KCl. They were mixed at a 1:1 ratio, creating an 80 mM solution, and incubated on a heat block at 37° C. for 30 minutes. Single-stranded donor oligonucleotides (ssODN; sequence: TTAGCTCTGTTTACGTCCCAGCGGGCATGAGAGTAACAAGAGGGTGTGGTAATAT TACGGTACCGAGCACTATCGATACAATATGTGTCATACGGACACG) (SEQ ID NO: 2577) was then added at a 1:1 molar ratio of the final Cas9-Guide complex, and mixed well by pipetting. The solution was incubated for an additional 5 minutes at 37° C. on the heat block. Cas9 was then added slowly at a 1:1 volume to volume ratio, taking care to avoid precipitation, pipetting up and down several times to ensure complete resuspension of the RNP complex, and incubated at 37° C. for 15 minutes completing the process of creating the assembled RNP-ssODN complex.

### Electroporation

[0235] 24 hours after virus was washed from the culture, cells were centrifuged at 100 g for 10 minutes to pellet them, and resuspended in room temperature Lonza P3 electroporation buffer (Lonza, Cat #V4XP-3032) at 1-2E6 cells per 17.8 μL. 7.2 μL of the RNP-ssODN complex were added for every 17.8 μL of cells and mixed well. Using a multichannel pipette, 23 μL of the cells-RNP-ssODN mixture were added per well to a 96 well electroporation cuvette plate (Lonza, Cat #VVPA-1002), and nucleofected using the pulse code EH-115. Immediately after electroporation, 90 μL of prewarmed media were added to each well and incubated at 37° C. for 15 minutes. Cells were then pooled, transferred to incubation flasks, and diluted with pre-warmed media to a final concentration of 1E⁶ cells/mL and incubated at 37° C. Cells were passaged at 48 hours post electroporation, and subsequently maintained in culture at 1E6 cells/mL.

### Results

[0236] FIG. 7A shows a xchematic of synthetic crRNA/Cas9 ribonucleoprotein arrayed knockout (KO) followed by in depth characterization of the KOs. FIG. 7B shows representative flow cytometry density plots for top hits in the IL2RA, IL-2, and CTLA4 screens. All plots were normalized to a maximum height of 1. KO of hits that decrease target levels are shown in orange and KO of hits that increase target levels are shown in blue.

[0237] FIGS. 7C-E show flow cytometry results for IL2RA, IL-2, and CTLA4 5 days after arrayed RNP KO. Screen hits analyzed are displayed on the Y axis ordered by their effect size in the pooled CRISPR screen. Changes in IL2RA, IL-2, and CTLA4 median fluorescence intensity relative to non-targeting controls is shown on the X-axis. Dots represent individual data points, bars depict average, and error bars depict standard deviation across 2 guide RNAs and 3 donors per guide RNA. Bars are colored by whether the flow cytometry effect matched the pooled CRISPR screen effect and whether the KO increased or decreased the level of IL2RA, IL-2, or CTLA4. The average insertion/deletion (indel) percentage across multiple donors for guide RNA 1 (n=3) and guide RNA 2 (n=2) at the genomic target site is shown to the right of each graph.

[0238] As shown in FIG. 7C, knockout of MED12, CBFB, HIVEP2, KLF2, MYB, FOXK1, ZNF217, IRF2, TNFAIP3, MYC, PRDM1, TFDP1, IRF1, FOXO1, ATXN7L3 or TP53, increased expression of IL2RA in cells. FIG. 7C also shows that knockout of IKZF3, YY1, MBD2, IRF4, IKZF1, RXRB, RELA, ETS1, KMT2A, PTEN, JAK3, STAT5A, GATA3, FOXP1, STAT5B, or IL2RA decreased expression of IL2RA in cells.

[0239] As shown in FIG. 7D, knockout of MED12, FOXP1, PTEN, IKZF1, TAF5L, PRDM1, TFDP1, CXXC1, IKZF3 or TP53 increased expression of IL2 in cells. FIG. 7D also shows that knockout of NFATC2, MAF, ZBTB7A, MBD2, GATA3, MED14, IRF2, MED30, ZBTB11, RELA, JAK3, MED11, BCL11B, MTF1, ATXN7L3, YY1, ETS1, IL2, DNMT1, GTF2B or SMARCB1, decreased expression of IL2 in cells.

[0240] As shown in FIG. 7E, knockout of CBFB, MYB, ZNF217, FOXK1, FLI1, FOS, SATB1, 1L2 or ATXN7L3, increased CTLA4 expression in cells. FIG. 7E also shows that knockout of MTF1, RELA, IRF1, BCL11B, STAT3, MED30, MED14, MED11, IKZF3, KMT2A, IKZF1, MED12, TAF5L, PTEN, IRF4, FOXO1, FOXP1 or CTLA4 decreased expression of CTLA4 in cells.

[0241] These studies also shows that knockout of ETS1, MYBL2, MYB, TP53, FLI1, SATB1, MBD2, ZBTB7A, DNMT1, TFDP1, SMARCB1 or MAF, increased expression of FOXP3 in cells (FIG. 7F). Further, knockout of TAF5L, FOXP3, GATA3, STAT5B, FOXP1, STAT5A, PTEN or FOXO1 decreased expression of FOXP3 in cells.

The application's sequence listing, which the Patent Office published only in electronic form, follows.

SEQUENCE LISTING (2577 sequences)

SEQ ID NO: 1 - DNA, 20 bp, Artificial Sequence
  Synthetic construct
aatatatccagtatatgcga

SEQ ID NO: 2 - DNA, 20 bp, Artificial Sequence
  Synthetic construct
gaagagcattctgccgcttg

SEQ ID NO: 3 - DNA, 20 bp, Artificial Sequence
  Synthetic construct
tattccaggaagagcaaccg

SEQ ID NO: 4 - DNA, 20 bp, Artificial Sequence
  Synthetic construct
tttagtccgtgcactggaga

SEQ ID NO: 5 - DNA, 20 bp, Artificial Sequence
  Synthetic construct
aattgatggcaaccgcaggg

SEQ ID NO: 6 - DNA, 20 bp, Artificial Sequence
  Synthetic construct
gctgtggcggaaaggagagt

SEQ ID NO: 7 - DNA, 20 bp, Artificial Sequence
  Synthetic construct
gtggcccaagtgtttgaacg

SEQ ID NO: 8 - DNA, 20 bp, Artificial Sequence
  Synthetic construct
ttcgtctttatgcagaagag

SEQ ID NO: 9 - DNA, 20 bp, Artificial Sequence
  Synthetic construct
agaaagtcagcgttacacaa

SEQ ID NO: 10 - DNA, 20 bp, Artificial Sequence
  Synthetic construct
ccagggtatttaacactcgc

SEQ ID NO: 11 - DNA, 20 bp, Artificial Sequence
  Synthetic construct
ggctcatgtgcggaaacaca

SEQ ID NO: 12 - DNA, 20 bp, Artificial Sequence
  Synthetic construct
tgttcttaagacaagcagtg

SEQ ID NO: 13 - DNA, 20 bp, Artificial Sequence
  Synthetic construct
aaaccagggccaccgaaagg

SEQ ID NO: 14 - DNA, 20 bp, Artificial Sequence
  Synthetic construct
ccctcgcgcttgaggccgcg

SEQ ID NO: 15 - DNA, 20 bp, Artificial Sequence
  Synthetic construct
cttcggtctcttcgacgacg

SEQ ID NO: 16 - DNA, 20 bp, Artificial Sequence
  Synthetic construct
tcggggtaatagaacgcagg

SEQ ID NO: 17 - DNA, 20 bp, Artificial Sequence
  Synthetic construct
aataagatgtgctcgcaaag

SEQ ID NO: 18 - DNA, 20 bp, Artificial Sequence
  Synthetic construct
caggacttacgagtacagaa

SEQ ID NO: 19 - DNA, 20 bp, Artificial Sequence
  Synthetic construct
ggcatatattcgactacaca

SEQ ID NO: 20 - DNA, 20 bp, Artificial Sequence
  Synthetic construct
tatacatcctactgatgaca

SEQ ID NO: 21 - DNA, 20 bp, Artificial Sequence
  Synthetic construct
ccacttgttaacagagaccg

SEQ ID NO: 22 - DNA, 20 bp, Artificial Sequence
  Synthetic construct
cttgtggcgctgaaaacgaa

SEQ ID NO: 23 - DNA, 20 bp, Artificial Sequence
  Synthetic construct
tatgccatgagtgctcagag

SEQ ID NO: 24 - DNA, 20 bp, Artificial Sequence
  Synthetic construct
tgagagactccagttgccag

SEQ ID NO: 25 - DNA, 20 bp, Artificial Sequence
  Synthetic construct
caagtaccgacgcgccagcg

SEQ ID NO: 26 - DNA, 20 bp, Artificial Sequence
  Synthetic construct
catcatccctcacggacccg

SEQ ID NO: 27 - DNA, 20 bp, Artificial Sequence
  Synthetic construct
gatgactgcactcaccaaca

SEQ ID NO: 28 - DNA, 20 bp, Artificial Sequence
  Synthetic construct
ggtgagcgaatgagtagact

SEQ ID NO: 29 - DNA, 20 bp, Artificial Sequence
  Synthetic construct
acgcttacttatttgaacca

SEQ ID NO: 30 - DNA, 20 bp, Artificial Sequence
  Synthetic construct
ctgtgggaataattgacaca

SEQ ID NO: 31 - DNA, 20 bp, Artificial Sequence
  Synthetic construct
ggtgattctctggcaaagcg

SEQ ID NO: 32 - DNA, 20 bp, Artificial Sequence
  Synthetic construct
tttactccacggaagcacgg

SEQ ID NO: 33 - DNA, 20 bp, Artificial Sequence
  Synthetic construct
agagtgcatcgacccctcgg

SEQ ID NO: 34 - DNA, 20 bp, Artificial Sequence
  Synthetic construct
ctgcggggaggactccgtcg

SEQ ID NO: 35 - DNA, 20 bp, Artificial Sequence
  Synthetic construct
cttcggggagacaacgacgg

SEQ ID NO: 36 - DNA, 20 bp, Artificial Sequence
  Synthetic construct
gctgcaccgagtcgtagtcg

SEQ ID NO: 37 - DNA, 20 bp, Artificial Sequence
  Synthetic construct
ccagtcgacacccatcattg

SEQ ID NO: 38 - DNA, 20 bp, Artificial Sequence
  Synthetic construct
ccccagtaaacgctccacag

SEQ ID NO: 39 - DNA, 20 bp, Artificial Sequence
  Synthetic construct
gaacgtcaccttagaatccg

SEQ ID NO: 40 - DNA, 20 bp, Artificial Sequence
  Synthetic construct
tctttgtctgccacaaacgt

SEQ ID NO: 41 - DNA, 20 bp, Artificial Sequence
  Synthetic construct
cacaccaagctgaaacagtg

SEQ ID NO: 42 - DNA, 20 bp, Artificial Sequence
  Synthetic construct
catgcgctttcgtcacagtg

SEQ ID NO: 43 - DNA, 20 bp, Artificial Sequence
  Synthetic construct
ggtgctctcgaagtttactg

SEQ ID NO: 44 - DNA, 20 bp, Artificial Sequence
  Synthetic construct
tgactacttacgatccaatg

SEQ ID NO: 45 - DNA, 20 bp, Artificial Sequence
  Synthetic construct
atatgatatcccagttggag

SEQ ID NO: 46 - DNA, 20 bp, Artificial Sequence
  Synthetic construct
ctgtctagtgaatcacatag

SEQ ID NO: 47 - DNA, 20 bp, Artificial Sequence
  Synthetic construct
gcactatattatcatcatgg

SEQ ID NO: 48 - DNA, 20 bp, Artificial Sequence
  Synthetic construct
ttctcatgtgtactacacgc

SEQ ID NO: 49 - DNA, 20 bp, Artificial Sequence
  Synthetic construct
acaaatcttctgcatgtcgg

SEQ ID NO: 50 - DNA, 20 bp, Artificial Sequence
  Synthetic construct
acaactacttgacaccatcg

SEQ ID NO: 51 - DNA, 20 bp, Artificial Sequence
  Synthetic construct
gaagcgtcgactgaatgacc

SEQ ID NO: 52 - DNA, 20 bp, Artificial Sequence
  Synthetic construct
ggaattagagagctacacaa

SEQ ID NO: 53 - DNA, 20 bp, Artificial Sequence
  Synthetic construct
aaacttaaatgtgagcatcc

SEQ ID NO: 54 - DNA, 20 bp, Artificial Sequence
  Synthetic construct
acaactggagcatttactgc

SEQ ID NO: 55 - DNA, 20 bp, Artificial Sequence
  Synthetic construct
agaagaagaactcaaacctc

SEQ ID NO: 56 - DNA, 20 bp, Artificial Sequence
  Synthetic construct
ttctttgtagaacttgaagt

SEQ ID NO: 57 - DNA, 20 bp, Artificial Sequence
  Synthetic construct
aacaaggcatcagtaaaagt

SEQ ID NO: 58 - DNA, 20 bp, Artificial Sequence
  Synthetic construct
accggatgacttaccatgtg

SEQ ID NO: 59 - DNA, 20 bp, Artificial Sequence
  Synthetic construct
ccttatctctaccatcgctg

SEQ ID NO: 60 - DNA, 20 bp, Artificial Sequence
  Synthetic construct
ttgccaccaaagacagactg

SEQ ID NO: 61 - DNA, 20 bp, Artificial Sequence
  Synthetic construct
cacggaccctgatagcatga

SEQ ID NO: 62 - DNA, 20 bp, Artificial Sequence
  Synthetic construct
catcgctcaggagatatacg

SEQ ID NO: 63 - DNA, 20 bp, Artificial Sequence
  Synthetic construct
gcagccgaatcgccaaccgc

SEQ ID NO: 64 - DNA, 20 bp, Artificial Sequence
  Synthetic construct
gcttcgcagcctgctaacca

SEQ ID NO: 65 - DNA, 20 bp, Artificial Sequence
  Synthetic construct
accggcagcgtcaaacaccc

SEQ ID NO: 66 - DNA, 20 bp, Artificial Sequence
  Synthetic construct
atgaccagaaaaacataaga

SEQ ID NO: 67 - DNA, 20 bp, Artificial Sequence
  Synthetic construct
ccttcatggagaaatgccgt

SEQ ID NO: 68 - DNA, 20 bp, Artificial Sequence
  Synthetic construct
ggtgcagagaaaccggcatg

SEQ ID NO: 69 - DNA, 20 bp, Artificial Sequence
  Synthetic construct
aagcacataaagatgaacgg

SEQ ID NO: 70 - DNA, 20 bp, Artificial Sequence
  Synthetic construct
gaattgctagttaaaacgcc

SEQ ID NO: 71 - DNA, 20 bp, Artificial Sequence
  Synthetic construct
gccctatcggcagtactacg

SEQ ID NO: 72 - DNA, 20 bp, Artificial Sequence
  Synthetic construct
tatgcatgatagtaagacga

SEQ ID NO: 73 - DNA, 20 bp, Artificial Sequence
  Synthetic construct
caatgaacgagcaacagcaa

SEQ ID NO: 74 - DNA, 20 bp, Artificial Sequence
  Synthetic construct
ccgtacactcagcatgaccc

SEQ ID NO: 75 - DNA, 20 bp, Artificial Sequence
  Synthetic construct
gaaatcgccaggcagttcgg

SEQ ID NO: 76 - DNA, 20 bp, Artificial Sequence
  Synthetic construct
tccaggatcagttcaaaccg

SEQ ID NO: 77 - DNA, 20 bp, Artificial Sequence
  Synthetic construct
ccattgttcaatatcgtccg

SEQ ID NO: 78 - DNA, 20 bp, Artificial Sequence
  Synthetic construct
gagcgctgctcagatagcga

SEQ ID NO: 79 - DNA, 20 bp, Artificial Sequence
  Synthetic construct
gatccactcacagtttccat

SEQ ID NO: 80 - DNA, 20 bp, Artificial Sequence
  Synthetic construct
ggtgccctatgagccgcctg

SEQ ID NO: 81 - DNA, 20 bp, Artificial Sequence
  Synthetic construct
acgagccaaaactgatcccg

SEQ ID NO: 82 - DNA, 20 bp, Artificial Sequence
  Synthetic construct
ctgaaggataggcattgtaa

SEQ ID NO: 83 - DNA, 20 bp, Artificial Sequence
  Synthetic construct
gttcacaatttcccgccgtg

SEQ ID NO: 84 - DNA, 20 bp, Artificial Sequence
  Synthetic construct
tctgcacagactccttgggt

SEQ ID NO: 85 - DNA, 20 bp, Artificial Sequence
  Synthetic construct
agcaaaccacctagtccctg

SEQ ID NO: 86 - DNA, 20 bp, Artificial Sequence
  Synthetic construct
cagagctacgaaccctatga

SEQ ID NO: 87 - DNA, 20 bp, Artificial Sequence
  Synthetic construct
tccggatggtgaggtcacat

SEQ ID NO: 88 - DNA, 20 bp, Artificial Sequence
  Synthetic construct
tgtataggcaaattcaagga

SEQ ID NO: 89 - DNA, 20 bp, Artificial Sequence
  Synthetic construct
agccgtagtatctcccacac

SEQ ID NO: 90 - DNA, 20 bp, Artificial Sequence
  Synthetic construct
ccacgacaagggacccgagg

SEQ ID NO: 91 - DNA, 20 bp, Artificial Sequence
  Synthetic construct
cctgcacatacggagagtaa

SEQ ID NO: 92 - DNA, 20 bp, Artificial Sequence
  Synthetic construct
ttccgcacagagacaaatgg

SEQ ID NO: 93 - DNA, 20 bp, Artificial Sequence
  Synthetic construct
ccggggctggtacttatgga

SEQ ID NO: 94 - DNA, 20 bp, Artificial Sequence
  Synthetic construct
cctggggtctccctacccgg

SEQ ID NO: 95 - DNA, 20 bp, Artificial Sequence
  Synthetic construct
gcggtaccagagcggcaagt

SEQ ID NO: 96 - DNA, 20 bp, Artificial Sequence
  Synthetic construct
taaacttggaccacaacagg

SEQ ID NO: 97 - DNA, 20 bp, Artificial Sequence
  Synthetic construct
gccccacgtcgggcgaggtg

SEQ ID NO: 98 - DNA, 20 bp, Artificial Sequence
  Synthetic construct
gctctcggacgggaggaacg

SEQ ID NO: 99 - DNA, 20 bp, Artificial Sequence
  Synthetic construct
ggcggcgcagccggtcaacg

SEQ ID NO: 100 - DNA, 20 bp, Artificial Sequence
  Synthetic construct
tgaacctggccgacccagtg

SEQ ID NO: 101 - DNA, 20 bp, Artificial Sequence
  Synthetic construct
ctccgttcatctggtcaaag

SEQ ID NO: 102 - DNA, 20 bp, Artificial Sequence
  Synthetic construct
ctttgaccagatgaacggag

SEQ ID NO: 103 - DNA, 20 bp, Artificial Sequence
  Synthetic construct
gggaaagatggtcaccgacg

SEQ ID NO: 104 - DNA, 20 bp, Artificial Sequence
  Synthetic construct
gtctgacaacatctacccgg

SEQ ID NO: 105 - DNA, 20 bp, Artificial Sequence
  Synthetic construct
acattggaagaaagaacacg

SEQ ID NO: 106 - DNA, 20 bp, Artificial Sequence
  Synthetic construct
atgtaaagttctgccccgtg

SEQ ID NO: 107 - DNA, 20 bp, Artificial Sequence
  Synthetic construct
gcagggcgagaggagaaact

SEQ ID NO: 108 - DNA, 20 bp, Artificial Sequence
  Synthetic construct
gccgcagccctcatctcacg

SEQ ID NO: 109 - DNA, 20 bp, Artificial Sequence
  Synthetic construct
cactgcggcccacgaagcga

SEQ ID NO: 110 - DNA, 20 bp, Artificial Sequence
  Synthetic construct
ccccaggatgcattatcccg

SEQ ID NO: 111 - DNA, 20 bp, Artificial Sequence
  Synthetic construct
ccgtgccgtaccttggattg

SEQ ID NO: 112 - DNA, 20 bp, Artificial Sequence
  Synthetic construct
tcggtggtaggtcgccactt

SEQ ID NO: 113 - DNA, 20 bp, Artificial Sequence
  Synthetic construct
atgctaagtacctgtgaaag

SEQ ID NO: 114 - DNA, 20 bp, Artificial Sequence
  Synthetic construct
cattgaatatgattgcaagg

SEQ ID NO: 115 - DNA, 20 bp, Artificial Sequence
  Synthetic construct
taggtgttgatacgagccca

SEQ ID NO: 116 - DNA, 20 bp, Artificial Sequence
  Synthetic construct
tattcatagatctactgaca

SEQ ID NO: 117 - DNA, 20 bp, Artificial Sequence
  Synthetic construct
gctgactgatacactccaag

SEQ ID NO: 118 - DNA, 20 bp, Artificial Sequence
  Synthetic construct
ggaaaaactagagttcatcc

SEQ ID NO: 119 - DNA, 20 bp, Artificial Sequence
  Synthetic construct
gtagtaagagaggctatccc

SEQ ID NO: 120 - DNA, 20 bp, Artificial Sequence
  Synthetic construct
gtcgagatggcagtgaccgt

SEQ ID NO: 121 - DNA, 20 bp, Artificial Sequence
  Synthetic construct
caaaatctcaccctgaaacg

SEQ ID NO: 122 - DNA, 20 bp, Artificial Sequence
  Synthetic construct
ccacggcgaagcgccctccg

SEQ ID NO: 123 - DNA, 20 bp, Artificial Sequence
  Synthetic construct
ggacacataatggcaaatcg

SEQ ID NO: 124 - DNA, 20 bp, Artificial Sequence
  Synthetic construct
tgggtggtactgccatccgg

SEQ ID NO: 125 - DNA, 20 bp, Artificial Sequence
  Synthetic construct
aacaggcattccggaaacgg

SEQ ID NO: 126 - DNA, 20 bp, Artificial Sequence
  Synthetic construct
aggtcacgttctgcacaaag

SEQ ID NO: 127 - DNA, 20 bp, Artificial Sequence
  Synthetic construct
ctaacttggacccaaactca

SEQ ID NO: 128 - DNA, 20 bp, Artificial Sequence
  Synthetic construct
gcattacccctactaccgga

SEQ ID NO: 129 - DNA, 20 bp, Artificial Sequence
  Synthetic construct
gagaacctcggaacatacgg

SEQ ID NO: 130 - DNA, 20 bp, Artificial Sequence
  Synthetic construct
gcagatcgagtcctacccca

SEQ ID NO: 131 - DNA, 20 bp, Artificial Sequence
  Synthetic construct
tcttcttgtctcggcccatg

SEQ ID NO: 132 - DNA, 20 bp, Artificial Sequence
  Synthetic construct
tgagaacgcatctcagcccg

SEQ ID NO: 133 - DNA, 20 bp, Artificial Sequence
  Synthetic construct
actcaatcgtgaggattggt

SEQ ID NO: 134 - DNA, 20 bp, Artificial Sequence
  Synthetic construct
actgtgtaaaatgaacaagg

SEQ ID NO: 135 - DNA, 20 bp, Artificial Sequence
  Synthetic construct
ccaacatgaccaccaacgag

SEQ ID NO: 136 - DNA, 20 bp, Artificial Sequence
  Synthetic construct
cttacctggatccattcatg

SEQ ID NO: 137 - DNA, 20 bp, Artificial Sequence
  Synthetic construct
accaggcacacaagagactg

SEQ ID NO: 138 - DNA, 20 bp, Artificial Sequence
  Synthetic construct
agaaatacggtccgaaacgt

SEQ ID NO: 139 - DNA, 20 bp, Artificial Sequence
  Synthetic construct
agtctggaaagcgtcacttg

SEQ ID NO: 140 - DNA, 20 bp, Artificial Sequence
  Synthetic construct
tatttacatgtaacgctaca

SEQ ID NO: 141 - DNA, 20 bp, Artificial Sequence
  Synthetic construct
aagtcgacatactctcggct

SEQ ID NO: 142 - DNA, 20 bp, Artificial Sequence
  Synthetic construct
cctgcctcacctcacactcg

SEQ ID NO: 143 - DNA, 20 bp, Artificial Sequence
  Synthetic construct
gccgacttacgatttccgag

SEQ ID NO: 144 - DNA, 20 bp, Artificial Sequence
  Synthetic construct
ggagtctgtgttatctggaa

SEQ ID NO: 145 - DNA, 20 bp, Artificial Sequence
  Synthetic construct
aatatatccagtatatgcga

SEQ ID NO: 146 - DNA, 20 bp, Artificial Sequence
  Synthetic construct
gaagagcattctgccgcttg

SEQ ID NO: 147 - DNA, 20 bp, Artificial Sequence
  Synthetic construct
tattccaggaagagcaaccg

SEQ ID NO: 148 - DNA, 20 bp, Artificial Sequence
  Synthetic construct
tttagtccgtgcactggaga

SEQ ID NO: 149 - DNA, 20 bp, Artificial Sequence
  Synthetic construct
aattgatggcaaccgcaggg

SEQ ID NO: 150 - DNA, 20 bp, Artificial Sequence
  Synthetic construct
gctgtggcggaaaggagagt

SEQ ID NO: 151 - DNA, 20 bp, Artificial Sequence
  Synthetic construct
gtggcccaagtgtttgaacg

SEQ ID NO: 152 - DNA, 20 bp, Artificial Sequence
  Synthetic construct
ttcgtctttatgcagaagag

SEQ ID NO: 153 - DNA, 20 bp, Artificial Sequence
  Synthetic construct
agaaagtcagcgttacacaa

SEQ ID NO: 154 - DNA, 20 bp, Artificial Sequence
  Synthetic construct
ccagggtatttaacactcgc

SEQ ID NO: 155 - DNA, 20 bp, Artificial Sequence
  Synthetic construct
ggctcatgtgcggaaacaca

SEQ ID NO: 156 - DNA, 20 bp, Artificial Sequence
  Synthetic construct
tgttcttaagacaagcagtg

SEQ ID NO: 157 - DNA, 20 bp, Artificial Sequence
  Synthetic construct
aaaccagggccaccgaaagg

SEQ ID NO: 158 - DNA, 20 bp, Artificial Sequence
  Synthetic construct
ccctcgcgcttgaggccgcg

SEQ ID NO: 159 - DNA, 20 bp, Artificial Sequence
  Synthetic construct
cttcggtctcttcgacgacg

SEQ ID NO: 160 - DNA, 20 bp, Artificial Sequence
  Synthetic construct
tcggggtaatagaacgcagg

SEQ ID NO: 161 - DNA, 20 bp, Artificial Sequence
  Synthetic construct
aataagatgtgctcgcaaag

SEQ ID NO: 162 - DNA, 20 bp, Artificial Sequence
  Synthetic construct
caggacttacgagtacagaa

SEQ ID NO: 163 - DNA, 20 bp, Artificial Sequence
  Synthetic construct
ggcatatattcgactacaca

SEQ ID NO: 164 - DNA, 20 bp, Artificial Sequence
  Synthetic construct
tatacatcctactgatgaca

SEQ ID NO: 165 - DNA, 20 bp, Artificial Sequence
  Synthetic construct
ccacttgttaacagagaccg

SEQ ID NO: 166 - DNA, 20 bp, Artificial Sequence
  Synthetic construct
cttgtggcgctgaaaacgaa

SEQ ID NO: 167 - DNA, 20 bp, Artificial Sequence
  Synthetic construct
tatgccatgagtgctcagag

SEQ ID NO: 168 - DNA, 20 bp, Artificial Sequence
  Synthetic construct
tgagagactccagttgccag

SEQ ID NO: 169 - DNA, 20 bp, Artificial Sequence
  Synthetic construct
caagtaccgacgcgccagcg

SEQ ID NO: 170 - DNA, 20 bp, Artificial Sequence
  Synthetic construct
catcatccctcacggacccg

SEQ ID NO: 171 - DNA, 20 bp, Artificial Sequence
  Synthetic construct
gatgactgcactcaccaaca

SEQ ID NO: 172 - DNA, 20 bp, Artificial Sequence
  Synthetic construct
ggtgagcgaatgagtagact

SEQ ID NO: 173 - DNA, 20 bp, Artificial Sequence
  Synthetic construct
acgcttacttatttgaacca

SEQ ID NO: 174 - DNA, 20 bp, Artificial Sequence
  Synthetic construct
ctgtgggaataattgacaca

SEQ ID NO: 175 - DNA, 20 bp, Artificial Sequence
  Synthetic construct
ggtgattctctggcaaagcg

SEQ ID NO: 176 - DNA, 20 bp, Artificial Sequence
  Synthetic construct
tttactccacggaagcacgg

SEQ ID NO: 177 - DNA, 20 bp, Artificial Sequence
  Synthetic construct
agagtgcatcgacccctcgg

SEQ ID NO: 178 - DNA, 20 bp, Artificial Sequence
  Synthetic construct
ctgcggggaggactccgtcg

SEQ ID NO: 179 - DNA, 20 bp, Artificial Sequence
  Synthetic construct
cttcggggagacaacgacgg

SEQ ID NO: 180 - DNA, 20 bp, Artificial Sequence
  Synthetic construct
gctgcaccgagtcgtagtcg

SEQ ID NO: 181 - DNA, 20 bp, Artificial Sequence
  Synthetic construct
ccagtcgacacccatcattg

SEQ ID NO: 182 - DNA, 20 bp, Artificial Sequence
  Synthetic construct
ccccagtaaacgctccacag

SEQ ID NO: 183 - DNA, 20 bp, Artificial Sequence
  Synthetic construct
gaacgtcaccttagaatccg

SEQ ID NO: 184 - DNA, 20 bp, Artificial Sequence
  Synthetic construct
tctttgtctgccacaaacgt

SEQ ID NO: 185 - DNA, 20 bp, Artificial Sequence
  Synthetic construct
cacaccaagctgaaacagtg

SEQ ID NO: 186 - DNA, 20 bp, Artificial Sequence
  Synthetic construct
catgcgctttcgtcacagtg

SEQ ID NO: 187 - DNA, 20 bp, Artificial Sequence
  Synthetic construct
ggtgctctcgaagtttactg

SEQ ID NO: 188 - DNA, 20 bp, Artificial Sequence
  Synthetic construct
tgactacttacgatccaatg

SEQ ID NO: 189 - DNA, 20 bp, Artificial Sequence
  Synthetic construct
atatgatatcccagttggag

SEQ ID NO: 190 - DNA, 20 bp, Artificial Sequence
  Synthetic construct
ctgtctagtgaatcacatag

SEQ ID NO: 191 - DNA, 20 bp, Artificial Sequence
  Synthetic construct
gcactatattatcatcatgg

SEQ ID NO: 192 - DNA, 20 bp, Artificial Sequence
  Synthetic construct
ttctcatgtgtactacacgc

SEQ ID NO: 193 - DNA, 20 bp, Artificial Sequence
  Synthetic construct
acaaatcttctgcatgtcgg

SEQ ID NO: 194 - DNA, 20 bp, Artificial Sequence
  Synthetic construct
acaactacttgacaccatcg

SEQ ID NO: 195 - DNA, 20 bp, Artificial Sequence
  Synthetic construct
gaagcgtcgactgaatgacc

SEQ ID NO: 196 - DNA, 20 bp, Artificial Sequence
  Synthetic construct
ggaattagagagctacacaa

SEQ ID NO: 197 - DNA, 20 bp, Artificial Sequence
  Synthetic construct
aaacttaaatgtgagcatcc

SEQ ID NO: 198 - DNA, 20 bp, Artificial Sequence
  Synthetic construct
acaactggagcatttactgc

SEQ ID NO: 199 - DNA, 20 bp, Artificial Sequence
  Synthetic construct
agaagaagaactcaaacctc

SEQ ID NO: 200 - DNA, 20 bp, Artificial Sequence
  Synthetic construct
ttctttgtagaacttgaagt

SEQ ID NO: 201 - DNA, 20 bp, Artificial Sequence
  Synthetic construct
aacaaggcatcagtaaaagt

SEQ ID NO: 202 - DNA, 20 bp, Artificial Sequence
  Synthetic construct
accggatgacttaccatgtg

SEQ ID NO: 203 - DNA, 20 bp, Artificial Sequence
  Synthetic construct
ccttatctctaccatcgctg

SEQ ID NO: 204 - DNA, 20 bp, Artificial Sequence
  Synthetic construct
ttgccaccaaagacagactg

SEQ ID NO: 205 - DNA, 20 bp, Artificial Sequence
  Synthetic construct
cacggaccctgatagcatga

SEQ ID NO: 206 - DNA, 20 bp, Artificial Sequence
  Synthetic construct
catcgctcaggagatatacg

SEQ ID NO: 207 - DNA, 20 bp, Artificial Sequence
  Synthetic construct
gcagccgaatcgccaaccgc

SEQ ID NO: 208 - DNA, 20 bp, Artificial Sequence
  Synthetic construct
gcttcgcagcctgctaacca

SEQ ID NO: 209 - DNA, 20 bp, Artificial Sequence
  Synthetic construct
accggcagcgtcaaacaccc

SEQ ID NO: 210 - DNA, 20 bp, Artificial Sequence
  Synthetic construct
atgaccagaaaaacataaga

SEQ ID NO: 211 - DNA, 20 bp, Artificial Sequence
  Synthetic construct
ccttcatggagaaatgccgt

SEQ ID NO: 212 - DNA, 20 bp, Artificial Sequence
  Synthetic construct
ggtgcagagaaaccggcatg

SEQ ID NO: 213 - DNA, 20 bp, Artificial Sequence
  Synthetic construct
aagcacataaagatgaacgg

SEQ ID NO: 214 - DNA, 20 bp, Artificial Sequence
  Synthetic construct
gaattgctagttaaaacgcc

SEQ ID NO: 215 - DNA, 20 bp, Artificial Sequence
  Synthetic construct
gccctatcggcagtactacg

SEQ ID NO: 216 - DNA, 20 bp, Artificial Sequence
  Synthetic construct
tatgcatgatagtaagacga

SEQ ID NO: 217 - DNA, 20 bp, Artificial Sequence
  Synthetic construct
caatgaacgagcaacagcaa

SEQ ID NO: 218 - DNA, 20 bp, Artificial Sequence
  Synthetic construct
ccgtacactcagcatgaccc

SEQ ID NO: 219 - DNA, 20 bp, Artificial Sequence
  Synthetic construct
gaaatcgccaggcagttcgg

SEQ ID NO: 220 - DNA, 20 bp, Artificial Sequence
  Synthetic construct
tccaggatcagttcaaaccg

SEQ ID NO: 221 - DNA, 20 bp, Artificial Sequence
  Synthetic construct
ccattgttcaatatcgtccg

SEQ ID NO: 222 - DNA, 20 bp, Artificial Sequence
  Synthetic construct
gagcgctgctcagatagcga

SEQ ID NO: 223 - DNA, 20 bp, Artificial Sequence
  Synthetic construct
gatccactcacagtttccat

SEQ ID NO: 224 - DNA, 20 bp, Artificial Sequence
  Synthetic construct
ggtgccctatgagccgcctg

SEQ ID NO: 225 - DNA, 20 bp, Artificial Sequence
  Synthetic construct
acgagccaaaactgatcccg

SEQ ID NO: 226 - DNA, 20 bp, Artificial Sequence
  Synthetic construct
ctgaaggataggcattgtaa

SEQ ID NO: 227 - DNA, 20 bp, Artificial Sequence
  Synthetic construct
gttcacaatttcccgccgtg

SEQ ID NO: 228 - DNA, 20 bp, Artificial Sequence
  Synthetic construct
tctgcacagactccttgggt

SEQ ID NO: 229 - DNA, 20 bp, Artificial Sequence
  Synthetic construct
agcaaaccacctagtccctg

SEQ ID NO: 230 - DNA, 20 bp, Artificial Sequence
  Synthetic construct
cagagctacgaaccctatga

SEQ ID NO: 231 - DNA, 20 bp, Artificial Sequence
  Synthetic construct
tccggatggtgaggtcacat

SEQ ID NO: 232 - DNA, 20 bp, Artificial Sequence
  Synthetic construct
tgtataggcaaattcaagga

SEQ ID NO: 233 - DNA, 20 bp, Artificial Sequence
  Synthetic construct
agccgtagtatctcccacac

SEQ ID NO: 234 - DNA, 20 bp, Artificial Sequence
  Synthetic construct
ccacgacaagggacccgagg

SEQ ID NO: 235 - DNA, 20 bp, Artificial Sequence
  Synthetic construct
cctgcacatacggagagtaa

SEQ ID NO: 236 - DNA, 20 bp, Artificial Sequence
  Synthetic construct
ttccgcacagagacaaatgg

SEQ ID NO: 237 - DNA, 20 bp, Artificial Sequence
  Synthetic construct
ccggggctggtacttatgga

SEQ ID NO: 238 - DNA, 20 bp, Artificial Sequence
  Synthetic construct
cctggggtctccctacccgg

SEQ ID NO: 239 - DNA, 20 bp, Artificial Sequence
  Synthetic construct
gcggtaccagagcggcaagt

SEQ ID NO: 240 - DNA, 20 bp, Artificial Sequence
  Synthetic construct
taaacttggaccacaacagg

SEQ ID NO: 241 - DNA, 20 bp, Artificial Sequence
  Synthetic construct
gccccacgtcgggcgaggtg

SEQ ID NO: 242 - DNA, 20 bp, Artificial Sequence
  Synthetic construct
gctctcggacgggaggaacg

SEQ ID NO: 243 - DNA, 20 bp, Artificial Sequence
  Synthetic construct
ggcggcgcagccggtcaacg

SEQ ID NO: 244 - DNA, 20 bp, Artificial Sequence
  Synthetic construct
tgaacctggccgacccagtg

SEQ ID NO: 245 - DNA, 20 bp, Artificial Sequence
  Synthetic construct
ctccgttcatctggtcaaag

SEQ ID NO: 246 - DNA, 20 bp, Artificial Sequence
  Synthetic construct
ctttgaccagatgaacggag

SEQ ID NO: 247 - DNA, 20 bp, Artificial Sequence
  Synthetic construct
gggaaagatggtcaccgacg

SEQ ID NO: 248 - DNA, 20 bp, Artificial Sequence
  Synthetic construct
gtctgacaacatctacccgg

SEQ ID NO: 249 - DNA, 20 bp, Artificial Sequence
  Synthetic construct
acattggaagaaagaacacg

SEQ ID NO: 250 - DNA, 20 bp, Artificial Sequence
  Synthetic construct
atgtaaagttctgccccgtg

SEQ ID NO: 251 - DNA, 20 bp, Artificial Sequence
  Synthetic construct
gcagggcgagaggagaaact

SEQ ID NO: 252 - DNA, 20 bp, Artificial Sequence
  Synthetic construct
gccgcagccctcatctcacg

SEQ ID NO: 253 - DNA, 20 bp, Artificial Sequence
  Synthetic construct
cactgcggcccacgaagcga

SEQ ID NO: 254 - DNA, 20 bp, Artificial Sequence
  Synthetic construct
ccccaggatgcattatcccg

SEQ ID NO: 255 - DNA, 20 bp, Artificial Sequence
  Synthetic construct
ccgtgccgtaccttggattg

SEQ ID NO: 256 - DNA, 20 bp, Artificial Sequence
  Synthetic construct
tcggtggtaggtcgccactt

SEQ ID NO: 257 - DNA, 20 bp, Artificial Sequence
  Synthetic construct
atgctaagtacctgtgaaag

SEQ ID NO: 258 - DNA, 20 bp, Artificial Sequence
  Synthetic construct
cattgaatatgattgcaagg

SEQ ID NO: 259 - DNA, 20 bp, Artificial Sequence
  Synthetic construct
taggtgttgatacgagccca

SEQ ID NO: 260 - DNA, 20 bp, Artificial Sequence
  Synthetic construct
tattcatagatctactgaca

SEQ ID NO: 261 - DNA, 20 bp, Artificial Sequence
  Synthetic construct
gctgactgatacactccaag

SEQ ID NO: 262 - DNA, 20 bp, Artificial Sequence
  Synthetic construct
ggaaaaactagagttcatcc

SEQ ID NO: 263 - DNA, 20 bp, Artificial Sequence
  Synthetic construct
gtagtaagagaggctatccc

SEQ ID NO: 264 - DNA, 20 bp, Artificial Sequence
  Synthetic construct
gtcgagatggcagtgaccgt

SEQ ID NO: 265 - DNA, 20 bp, Artificial Sequence
  Synthetic construct
caaaatctcaccctgaaacg

SEQ ID NO: 266 - DNA, 20 bp, Artificial Sequence
  Synthetic construct
ccacggcgaagcgccctccg

SEQ ID NO: 267 - DNA, 20 bp, Artificial Sequence
  Synthetic construct
ggacacataatggcaaatcg

SEQ ID NO: 268 - DNA, 20 bp, Artificial Sequence
  Synthetic construct
tgggtggtactgccatccgg

SEQ ID NO: 269 - DNA, 20 bp, Artificial Sequence
  Synthetic construct
aacaggcattccggaaacgg

SEQ ID NO: 270 - DNA, 20 bp, Artificial Sequence
  Synthetic construct
aggtcacgttctgcacaaag

SEQ ID NO: 271 - DNA, 20 bp, Artificial Sequence
  Synthetic construct
ctaacttggacccaaactca

SEQ ID NO: 272 - DNA, 20 bp, Artificial Sequence
  Synthetic construct
gcattacccctactaccgga

SEQ ID NO: 273 - DNA, 20 bp, Artificial Sequence
  Synthetic construct
gagaacctcggaacatacgg

SEQ ID NO: 274 - DNA, 20 bp, Artificial Sequence
  Synthetic construct
gcagatcgagtcctacccca

SEQ ID NO: 275 - DNA, 20 bp, Artificial Sequence
  Synthetic construct
tcttcttgtctcggcccatg

SEQ ID NO: 276 - DNA, 20 bp, Artificial Sequence
  Synthetic construct
tgagaacgcatctcagcccg

SEQ ID NO: 277 - DNA, 20 bp, Artificial Sequence
  Synthetic construct
actcaatcgtgaggattggt

SEQ ID NO: 278 - DNA, 20 bp, Artificial Sequence
  Synthetic construct
actgtgtaaaatgaacaagg

SEQ ID NO: 279 - DNA, 20 bp, Artificial Sequence
  Synthetic construct
ccaacatgaccaccaacgag

SEQ ID NO: 280 - DNA, 20 bp, Artificial Sequence
  Synthetic construct
cttacctggatccattcatg

SEQ ID NO: 281 - DNA, 20 bp, Artificial Sequence
  Synthetic construct
accaggcacacaagagactg

SEQ ID NO: 282 - DNA, 20 bp, Artificial Sequence
  Synthetic construct
agaaatacggtccgaaacgt

SEQ ID NO: 283 - DNA, 20 bp, Artificial Sequence
  Synthetic construct
agtctggaaagcgtcacttg

SEQ ID NO: 284 - DNA, 20 bp, Artificial Sequence
  Synthetic construct
tatttacatgtaacgctaca

SEQ ID NO: 285 - DNA, 20 bp, Artificial Sequence
  Synthetic construct
aagtcgacatactctcggct

SEQ ID NO: 286 - DNA, 20 bp, Artificial Sequence
  Synthetic construct
cctgcctcacctcacactcg

SEQ ID NO: 287 - DNA, 20 bp, Artificial Sequence
  Synthetic construct
gccgacttacgatttccgag

SEQ ID NO: 288 - DNA, 20 bp, Artificial Sequence
  Synthetic construct
ggagtctgtgttatctggaa

SEQ ID NO: 289 - DNA, 20 bp, Artificial Sequence
  Synthetic construct
cctcactatccaaggactga

SEQ ID NO: 290 - DNA, 20 bp, Artificial Sequence
  Synthetic construct
gcagatggaatcatctagga

SEQ ID NO: 291 - DNA, 20 bp, Artificial Sequence
  Synthetic construct
tacccaccgccatactacct

SEQ ID NO: 292 - DNA, 20 bp, Artificial Sequence
  Synthetic construct
ttccatgctagcaatgcacg

SEQ ID NO: 293 - DNA, 20 bp, Artificial Sequence
  Synthetic construct
agaggaggagacacatgtcg

SEQ ID NO: 294 - DNA, 20 bp, Artificial Sequence
  Synthetic construct
catacaccatgtccatagag

SEQ ID NO: 295 - DNA, 20 bp, Artificial Sequence
  Synthetic construct
gccttctgacaattcagccc

SEQ ID NO: 296 - DNA, 20 bp, Artificial Sequence
  Synthetic construct
gttctgtagacttcacatgc

SEQ ID NO: 297 - DNA, 20 bp, Artificial Sequence
  Synthetic construct
agagcgtgcagataatgaca

SEQ ID NO: 298 - DNA, 20 bp, Artificial Sequence
  Synthetic construct
agctggcagaccacaaactg

SEQ ID NO: 299 - DNA, 20 bp, Artificial Sequence
  Synthetic construct
attcttcataccaggaccag

SEQ ID NO: 300 - DNA, 20 bp, Artificial Sequence
  Synthetic construct
ccaattcaggacccacacga

SEQ ID NO: 301 - DNA, 20 bp, Artificial Sequence
  Synthetic construct
acaggttgccccacgcgttg

SEQ ID NO: 302 - DNA, 20 bp, Artificial Sequence
  Synthetic construct
ggagtttagccagtccaact

SEQ ID NO: 303 - DNA, 20 bp, Artificial Sequence
  Synthetic construct
ggtggcgcaaacgagtagca

SEQ ID NO: 304 - DNA, 20 bp, Artificial Sequence
  Synthetic construct
tagcatttgagctagttcga

SEQ ID NO: 305 - DNA, 20 bp, Artificial Sequence
  Synthetic construct
acatcgactgctggacaatg

SEQ ID NO: 306 - DNA, 20 bp, Artificial Sequence
  Synthetic construct
cagtgagtagtgccaaacca

SEQ ID NO: 307 - DNA, 20 bp, Artificial Sequence
  Synthetic construct
gtggcgtactgcacgtgtcg

SEQ ID NO: 308 - DNA, 20 bp, Artificial Sequence
  Synthetic construct
ttcacattatgaccaacacc

SEQ ID NO: 309 - DNA, 20 bp, Artificial Sequence
  Synthetic construct
cagacccgtacaaagtgtac

SEQ ID NO: 310 - DNA, 20 bp, Artificial Sequence
  Synthetic construct
cccatgacgtttggaccccg

SEQ ID NO: 311 - DNA, 20 bp, Artificial Sequence
  Synthetic construct
ctaccgggaaatcctcgtga

SEQ ID NO: 312 - DNA, 20 bp, Artificial Sequence
  Synthetic construct
ctgatcgaccagatcgacag

SEQ ID NO: 313 - DNA, 20 bp, Artificial Sequence
  Synthetic construct
aagatcagtagcggtcccgg

SEQ ID NO: 314 - DNA, 20 bp, Artificial Sequence
  Synthetic construct
agaaaggacgtcgatcgagg

SEQ ID NO: 315 - DNA, 20 bp, Artificial Sequence
  Synthetic construct
aggggtcttaatgatccgcg

SEQ ID NO: 316 - DNA, 20 bp, Artificial Sequence
  Synthetic construct
ttgaccataattatgctcag

SEQ ID NO: 317 - DNA, 20 bp, Artificial Sequence
  Synthetic construct
aagatgaactgcgatgtgtg

SEQ ID NO: 318 - DNA, 20 bp, Artificial Sequence
  Synthetic construct
caagcagagaagttcccttg

SEQ ID NO: 319 - DNA, 20 bp, Artificial Sequence
  Synthetic construct
gctcatacagacccgcatga

SEQ ID NO: 320 - DNA, 20 bp, Artificial Sequence
  Synthetic construct
ggacagattagcaagcaatg

SEQ ID NO: 321 - DNA, 20 bp, Artificial Sequence
  Synthetic construct
acactggaacatatcaagac

SEQ ID NO: 322 - DNA, 20 bp, Artificial Sequence
  Synthetic construct
gacaaatgcaatgaaaactg

SEQ ID NO: 323 - DNA, 20 bp, Artificial Sequence
  Synthetic construct
ggacatcgtgtaccgcacca

SEQ ID NO: 324 - DNA, 20 bp, Artificial Sequence
  Synthetic construct
ggccgcccgggaagtcaaca

SEQ ID NO: 325 - DNA, 20 bp, Artificial Sequence
  Synthetic construct
gaactccctgccagatatcg

SEQ ID NO: 326 - DNA, 20 bp, Artificial Sequence
  Synthetic construct
tctaggccgatacaaagcag

SEQ ID NO: 327 - DNA, 20 bp, Artificial Sequence
  Synthetic construct
tctccctcgacagtcatgtg

SEQ ID NO: 328 - DNA, 20 bp, Artificial Sequence
  Synthetic construct
ttaattccaaccaaatcccg

SEQ ID NO: 329 - DNA, 20 bp, Artificial Sequence
  Synthetic construct
actacgacctgaatgctgtg

SEQ ID NO: 330 - DNA, 20 bp, Artificial Sequence
  Synthetic construct
gcttccgctacaagtgcgag

SEQ ID NO: 331 - DNA, 20 bp, Artificial Sequence
  Synthetic construct
ggaagatctcatccccaccg

SEQ ID NO: 332 - DNA, 20 bp, Artificial Sequence
  Synthetic construct
tcaatggctacacaggacca

SEQ ID NO: 333 - DNA, 20 bp, Artificial Sequence
  Synthetic construct
atcacacatagcgacgaagt

SEQ ID NO: 334 - DNA, 20 bp, Artificial Sequence
  Synthetic construct
cagagcatctctagctaacg

SEQ ID NO: 335 - DNA, 20 bp, Artificial Sequence
  Synthetic construct
ctaactctgctacccaagtg

SEQ ID NO: 336 - DNA, 20 bp, Artificial Sequence
  Synthetic construct
taatgttaatccgagaacgg

SEQ ID NO: 337 - DNA, 20 bp, Artificial Sequence
  Synthetic construct
cgggacacgtctacttggtg

SEQ ID NO: 338 - DNA, 20 bp, Artificial Sequence
  Synthetic construct
gcagaacgaggctgccctag

SEQ ID NO: 339 - DNA, 20 bp, Artificial Sequence
  Synthetic construct
gcggaccagtgtacagcacg

SEQ ID NO: 340 - DNA, 20 bp, Artificial Sequence
  Synthetic construct
taaggtgaggactttgcaca

SEQ ID NO: 341 - DNA, 20 bp, Artificial Sequence
  Synthetic construct
aatgcacttccacaacacaa

SEQ ID NO: 342 - DNA, 20 bp, Artificial Sequence
  Synthetic construct
aatgtgctgcacataaccct

SEQ ID NO: 343 - DNA, 20 bp, Artificial Sequence
  Synthetic construct
ccacgtgcgagtgcacacga

SEQ ID NO: 344 - DNA, 20 bp, Artificial Sequence
  Synthetic construct
gcacattcgaactcatacag

SEQ ID NO: 345 - DNA, 20 bp, Artificial Sequence
  Synthetic construct
gaaaatgaatggctcccaca

SEQ ID NO: 346 - DNA, 20 bp, Artificial Sequence
  Synthetic construct
gatggcttggtccatcacgt

SEQ ID NO: 347 - DNA, 20 bp, Artificial Sequence
  Synthetic construct
ggggcctcattcacccagaa

SEQ ID NO: 348 - DNA, 20 bp, Artificial Sequence
  Synthetic construct
tccaagagtgacagagtcgt

SEQ ID NO: 349 - DNA, 20 bp, Artificial Sequence
  Synthetic construct
agcaagtcgtgcgagttctg

SEQ ID NO: 350 - DNA, 20 bp, Artificial Sequence
  Synthetic construct
ccagcagctcgctcacgccg

SEQ ID NO: 351 - DNA, 20 bp, Artificial Sequence
  Synthetic construct
ccgccatggacttctcgcgg

SEQ ID NO: 352 - DNA, 20 bp, Artificial Sequence
  Synthetic construct
tcagggtgagggtcagacgg

SEQ ID NO: 353 - DNA, 20 bp, Artificial Sequence
  Synthetic construct
aacatggaagaatccaacaa

SEQ ID NO: 354 - DNA, 20 bp, Artificial Sequence
  Synthetic construct
acgccggtcttgatgacgag

SEQ ID NO: 355 - DNA, 20 bp, Artificial Sequence
  Synthetic construct
gagaccgaggtgtatcacca

SEQ ID NO: 356 - DNA, 20 bp, Artificial Sequence
  Synthetic construct
tcggccggtgctgtacaatg

SEQ ID NO: 357 - DNA, 20 bp, Artificial Sequence
  Synthetic construct
cgttacccagaatatcacgg

SEQ ID NO: 358 - DNA, 20 bp, Artificial Sequence
  Synthetic construct
gcacatccgtatacactcag

SEQ ID NO: 359 - DNA, 20 bp, Artificial Sequence
  Synthetic construct
ggtagcatcgaccctaaccg

SEQ ID NO: 360 - DNA, 20 bp, Artificial Sequence
  Synthetic construct
tggcccccgagtggatacgg

SEQ ID NO: 361 - DNA, 20 bp, Artificial Sequence
  Synthetic construct
aaaggagcagagcaaaaccg

SEQ ID NO: 362 - DNA, 20 bp, Artificial Sequence
  Synthetic construct
actgctatcctgaatagaca

SEQ ID NO: 363 - DNA, 20 bp, Artificial Sequence
  Synthetic construct
gaggacttgggaaattcaag

SEQ ID NO: 364 - DNA, 20 bp, Artificial Sequence
  Synthetic construct
gccttcgatcaagtgcactg

SEQ ID NO: 365 - DNA, 20 bp, Artificial Sequence
  Synthetic construct
aatagtcttcccctagcact

SEQ ID NO: 366 - DNA, 20 bp, Artificial Sequence
  Synthetic construct
attacagatcaattgtatct

SEQ ID NO: 367 - DNA, 20 bp, Artificial Sequence
  Synthetic construct
caagcaatatcctattaccc

SEQ ID NO: 368 - DNA, 20 bp, Artificial Sequence
  Synthetic construct
tttgtgttgatgaatcctgg

SEQ ID NO: 369 - DNA, 20 bp, Artificial Sequence
  Synthetic construct
atcccgaacctgcattctga

SEQ ID NO: 370 - DNA, 20 bp, Artificial Sequence
  Synthetic construct
caccgcttcagtgcaacacg

SEQ ID NO: 371 - DNA, 20 bp, Artificial Sequence
  Synthetic construct
ccaaggaaaaaactaacgag

SEQ ID NO: 372 - DNA, 20 bp, Artificial Sequence
  Synthetic construct
gcggctcctagaccggcagg

SEQ ID NO: 373 - DNA, 20 bp, Artificial Sequence
  Synthetic construct
tcggaggtaaacttggccgt

SEQ ID NO: 374 - DNA, 20 bp, Artificial Sequence
  Synthetic construct
tctaagttgtaacaaaagct

SEQ ID NO: 375 - DNA, 20 bp, Artificial Sequence
  Synthetic construct
tctgaggctgaaacatagca

SEQ ID NO: 376 - DNA, 20 bp, Artificial Sequence
  Synthetic construct
tgccagtactcctccagaga

SEQ ID NO: 377 - DNA, 20 bp, Artificial Sequence
  Synthetic construct
agctgtactagagttacggt

SEQ ID NO: 378 - DNA, 20 bp, Artificial Sequence
  Synthetic construct
ggctaacaatggtaccgatg

SEQ ID NO: 379 - DNA, 20 bp, Artificial Sequence
  Synthetic construct
tggagttggcaccgttacag

SEQ ID NO: 380 - DNA, 20 bp, Artificial Sequence
  Synthetic construct
tgtggagactgaataactga

SEQ ID NO: 381 - DNA, 30 bp, Artificial Sequence
  Synthetic construct
tgaacctcactatccaaggactgagggcca

SEQ ID NO: 382 - DNA, 30 bp, Artificial Sequence
  Synthetic construct
ccgtgcagatggaatcatctaggaaggtca

SEQ ID NO: 383 - DNA, 30 bp, Artificial Sequence
  Synthetic construct
catgtacccaccgccatactacctgggcat

SEQ ID NO: 384 - DNA, 30 bp, Artificial Sequence
  Synthetic construct
gcttttccatgctagcaatgcacgtggccc

SEQ ID NO: 385 - DNA, 30 bp, Artificial Sequence
  Synthetic construct
gtgcagaggaggagacacatgtcgtggtca

SEQ ID NO: 386 - DNA, 30 bp, Artificial Sequence
  Synthetic construct
cttgcatacaccatgtccatagagaggatg

SEQ ID NO: 387 - DNA, 30 bp, Artificial Sequence
  Synthetic construct
caaggccttctgacaattcagcccgggcag

SEQ ID NO: 388 - DNA, 30 bp, Artificial Sequence
  Synthetic construct
ttgggttctgtagacttcacatgcaggtgg

SEQ ID NO: 389 - DNA, 30 bp, Artificial Sequence
  Synthetic construct
gtatagagcgtgcagataatgacaaggaat

SEQ ID NO: 390 - DNA, 30 bp, Artificial Sequence
  Synthetic construct
ctttagctggcagaccacaaactgaggatc

SEQ ID NO: 391 - DNA, 30 bp, Artificial Sequence
  Synthetic construct
atacattcttcataccaggaccagaggaaa

SEQ ID NO: 392 - DNA, 30 bp, Artificial Sequence
  Synthetic construct
tcctccaattcaggacccacacgacgggaa

SEQ ID NO: 393 - DNA, 30 bp, Artificial Sequence
  Synthetic construct
taggacaggttgccccacgcgttgcggcgg

SEQ ID NO: 394 - DNA, 30 bp, Artificial Sequence
  Synthetic construct
ggccggagtttagccagtccaactcggcca

SEQ ID NO: 395 - DNA, 30 bp, Artificial Sequence
  Synthetic construct
gtttggtggcgcaaacgagtagcacggcgt

SEQ ID NO: 396 - DNA, 30 bp, Artificial Sequence
  Synthetic construct
gtactagcatttgagctagttcgagggcga

SEQ ID NO: 397 - DNA, 30 bp, Artificial Sequence
  Synthetic construct
atccacatcgactgctggacaatgaggatg

SEQ ID NO: 398 - DNA, 30 bp, Artificial Sequence
  Synthetic construct
cagtcagtgagtagtgccaaaccaaggcac

SEQ ID NO: 399 - DNA, 30 bp, Artificial Sequence
  Synthetic construct
atgggtggcgtactgcacgtgtcgtggctg

SEQ ID NO: 400 - DNA, 30 bp, Artificial Sequence
  Synthetic construct
acctttcacattatgaccaacaccaggtca

SEQ ID NO: 401 - DNA, 30 bp, Artificial Sequence
  Synthetic construct
atctcagacccgtacaaagtgtacaggatt

SEQ ID NO: 402 - DNA, 30 bp, Artificial Sequence
  Synthetic construct
atgtcccatgacgtttggaccccgcggcca

SEQ ID NO: 403 - DNA, 30 bp, Artificial Sequence
  Synthetic construct
tgtactaccgggaaatcctcgtgaaggagc

SEQ ID NO: 404 - DNA, 30 bp, Artificial Sequence
  Synthetic construct
gtggctgatcgaccagatcgacagcggcaa

SEQ ID NO: 405 - DNA, 30 bp, Artificial Sequence
  Synthetic construct
attcaagatcagtagcggtcccggtggtgg

SEQ ID NO: 406 - DNA, 30 bp, Artificial Sequence
  Synthetic construct
gtaaagaaaggacgtcgatcgaggcggtgt

SEQ ID NO: 407 - DNA, 30 bp, Artificial Sequence
  Synthetic construct
gccgaggggtcttaatgatccgcgaggaga

SEQ ID NO: 408 - DNA, 30 bp, Artificial Sequence
  Synthetic construct
tcacttgaccataattatgctcagtggcag

SEQ ID NO: 409 - DNA, 30 bp, Artificial Sequence
  Synthetic construct
tggaaagatgaactgcgatgtgtgtggatt

SEQ ID NO: 410 - DNA, 30 bp, Artificial Sequence
  Synthetic construct
gttacaagcagagaagttcccttgaggagc

SEQ ID NO: 411 - DNA, 30 bp, Artificial Sequence
  Synthetic construct
gtgagctcatacagacccgcatgatggacc

SEQ ID NO: 412 - DNA, 30 bp, Artificial Sequence
  Synthetic construct
tactggacagattagcaagcaatgtggcaa

SEQ ID NO: 413 - DNA, 30 bp, Artificial Sequence
  Synthetic construct
taccacactggaacatatcaagaccggtta

SEQ ID NO: 414 - DNA, 30 bp, Artificial Sequence
  Synthetic construct
atatgacaaatgcaatgaaaactgtggtgg

SEQ ID NO: 415 - DNA, 30 bp, Artificial Sequence
  Synthetic construct
tgcaggacatcgtgtaccgcaccatggaga

SEQ ID NO: 416 - DNA, 30 bp, Artificial Sequence
  Synthetic construct
agcaggccgcccgggaagtcaacacggcgt

SEQ ID NO: 417 - DNA, 30 bp, Artificial Sequence
  Synthetic construct
ccatgaactccctgccagatatcgaggagg

SEQ ID NO: 418 - DNA, 30 bp, Artificial Sequence
  Synthetic construct
gccctctaggccgatacaaagcaggggaaa

SEQ ID NO: 419 - DNA, 30 bp, Artificial Sequence
  Synthetic construct
gctttctccctcgacagtcatgtggggatt

SEQ ID NO: 420 - DNA, 30 bp, Artificial Sequence
  Synthetic construct
cagattaattccaaccaaatcccggggctc

SEQ ID NO: 421 - DNA, 30 bp, Artificial Sequence
  Synthetic construct
ggggactacgacctgaatgctgtgcggctc

SEQ ID NO: 422 - DNA, 30 bp, Artificial Sequence
  Synthetic construct
atgcgcttccgctacaagtgcgaggggcgc

SEQ ID NO: 423 - DNA, 30 bp, Artificial Sequence
  Synthetic construct
agtaggaagatctcatccccaccgaggcag

SEQ ID NO: 424 - DNA, 30 bp, Artificial Sequence
  Synthetic construct
cagatcaatggctacacaggaccagggaca

SEQ ID NO: 425 - DNA, 30 bp, Artificial Sequence
  Synthetic construct
ttgtatcacacatagcgacgaagtgggcta

SEQ ID NO: 426 - DNA, 30 bp, Artificial Sequence
  Synthetic construct
ggaccagagcatctctagctaacgaggcca

SEQ ID NO: 427 - DNA, 30 bp, Artificial Sequence
  Synthetic construct
aacactaactctgctacccaagtgcggtta

SEQ ID NO: 428 - DNA, 30 bp, Artificial Sequence
  Synthetic construct
actctaatgttaatccgagaacggtgggga

SEQ ID NO: 429 - DNA, 30 bp, Artificial Sequence
  Synthetic construct
gatgcgggacacgtctacttggtggggctc

SEQ ID NO: 430 - DNA, 30 bp, Artificial Sequence
  Synthetic construct
ttctgcagaacgaggctgccctagaggtct

SEQ ID NO: 431 - DNA, 30 bp, Artificial Sequence
  Synthetic construct
cactgcggaccagtgtacagcacgaggttc

SEQ ID NO: 432 - DNA, 30 bp, Artificial Sequence
  Synthetic construct
tatgtaaggtgaggactttgcacagggcag

SEQ ID NO: 433 - DNA, 30 bp, Artificial Sequence
  Synthetic construct
atacaatgcacttccacaacacaatggatc

SEQ ID NO: 434 - DNA, 30 bp, Artificial Sequence
  Synthetic construct
agataatgtgctgcacataaccctgggaca

SEQ ID NO: 435 - DNA, 30 bp, Artificial Sequence
  Synthetic construct
ggatccacgtgcgagtgcacacgaaggaga

SEQ ID NO: 436 - DNA, 30 bp, Artificial Sequence
  Synthetic construct
ggaagcacattcgaactcatacaggggaaa

SEQ ID NO: 437 - DNA, 30 bp, Artificial Sequence
  Synthetic construct
gagagaaaatgaatggctcccacagggacc

SEQ ID NO: 438 - DNA, 30 bp, Artificial Sequence
  Synthetic construct
tgttgatggcttggtccatcacgtgggact

SEQ ID NO: 439 - DNA, 30 bp, Artificial Sequence
  Synthetic construct
gtgcggggcctcattcacccagaagggcaa

SEQ ID NO: 440 - DNA, 30 bp, Artificial Sequence
  Synthetic construct
aagctccaagagtgacagagtcgtgggtaa

SEQ ID NO: 441 - DNA, 30 bp, Artificial Sequence
  Synthetic construct
caagagcaagtcgtgcgagttctgcggcaa

SEQ ID NO: 442 - DNA, 30 bp, Artificial Sequence
  Synthetic construct
ccggccagcagctcgctcacgccgcggctc

SEQ ID NO: 443 - DNA, 30 bp, Artificial Sequence
  Synthetic construct
tcgcccgccatggacttctcgcggcggctc

SEQ ID NO: 444 - DNA, 30 bp, Artificial Sequence
  Synthetic construct
ggactcagggtgagggtcagacggaggctc

SEQ ID NO: 445 - DNA, 30 bp, Artificial Sequence
  Synthetic construct
gatgaacatggaagaatccaacaacggcag

SEQ ID NO: 446 - DNA, 30 bp, Artificial Sequence
  Synthetic construct
ctggacgccggtcttgatgacgaggggccg

SEQ ID NO: 447 - DNA, 30 bp, Artificial Sequence
  Synthetic construct
ctttgagaccgaggtgtatcaccaaggcct

SEQ ID NO: 448 - DNA, 30 bp, Artificial Sequence
  Synthetic construct
agcatcggccggtgctgtacaatggggtcc

SEQ ID NO: 449 - DNA, 30 bp, Artificial Sequence
  Synthetic construct
cgtccgttacccagaatatcacggtggtcc

SEQ ID NO: 450 - DNA, 30 bp, Artificial Sequence
  Synthetic construct
cccagcacatccgtatacactcaggggcta

SEQ ID NO: 451 - DNA, 30 bp, Artificial Sequence
  Synthetic construct
agaaggtagcatcgaccctaaccgaggaag

SEQ ID NO: 452 - DNA, 30 bp, Artificial Sequence
  Synthetic construct
ggcttggcccccgagtggatacggaggtgc

SEQ ID NO: 453 - DNA, 30 bp, Artificial Sequence
  Synthetic construct
ctgtaaaggagcagagcaaaaccgtggtca

SEQ ID NO: 454 - DNA, 30 bp, Artificial Sequence
  Synthetic construct
cttcactgctatcctgaatagacacggtat

SEQ ID NO: 455 - DNA, 30 bp, Artificial Sequence
  Synthetic construct
ctcagaggacttgggaaattcaaggggcgg

SEQ ID NO: 456 - DNA, 30 bp, Artificial Sequence
  Synthetic construct
aaaggccttcgatcaagtgcactgcggcca

SEQ ID NO: 457 - DNA, 30 bp, Artificial Sequence
  Synthetic construct
ctgtaatagtcttcccctagcactgggtca

SEQ ID NO: 458 - DNA, 30 bp, Artificial Sequence
  Synthetic construct
tgacattacagatcaattgtatctgggatc

SEQ ID NO: 459 - DNA, 30 bp, Artificial Sequence
  Synthetic construct
tgggcaagcaatatcctattacccgggtaa

SEQ ID NO: 460 - DNA, 30 bp, Artificial Sequence
  Synthetic construct
tctctttgtgttgatgaatcctggaggctt

SEQ ID NO: 461 - DNA, 30 bp, Artificial Sequence
  Synthetic construct
tcgcatcccgaacctgcattctgaaggatg

SEQ ID NO: 462 - DNA, 30 bp, Artificial Sequence
  Synthetic construct
ccttcaccgcttcagtgcaacacgtggagg

SEQ ID NO: 463 - DNA, 30 bp, Artificial Sequence
  Synthetic construct
ttgtccaaggaaaaaactaacgagcggctc

SEQ ID NO: 464 - DNA, 30 bp, Artificial Sequence
  Synthetic construct
acgagcggctcctagaccggcaggcggcgg

SEQ ID NO: 465 - DNA, 30 bp, Artificial Sequence
  Synthetic construct
ggggtcggaggtaaacttggccgtgggaga

SEQ ID NO: 466 - DNA, 30 bp, Artificial Sequence
  Synthetic construct
ggtctctaagttgtaacaaaagctcgggct

SEQ ID NO: 467 - DNA, 30 bp, Artificial Sequence
  Synthetic construct
gatttctgaggctgaaacatagcagggctc

SEQ ID NO: 468 - DNA, 30 bp, Artificial Sequence
  Synthetic construct
ctgttgccagtactcctccagagacggcag

SEQ ID NO: 469 - DNA, 30 bp, Artificial Sequence
  Synthetic construct
gggcagctgtactagagttacggtgggagc

SEQ ID NO: 470 - DNA, 30 bp, Artificial Sequence
  Synthetic construct
agctggctaacaatggtaccgatggggtac

SEQ ID NO: 471 - DNA, 30 bp, Artificial Sequence
  Synthetic construct
aaattggagttggcaccgttacagtggtga

SEQ ID NO: 472 - DNA, 30 bp, Artificial Sequence
  Synthetic construct
gacttgtggagactgaataactgatggctg

SEQ ID NO: 473 - DNA, 20 bp, Artificial Sequence
  Synthetic construct
aaagttctggataacaggat

SEQ ID NO: 474 - DNA, 20 bp, Artificial Sequence
  Synthetic construct
cgcgcggcgatcggacacga

SEQ ID NO: 475 - DNA, 20 bp, Artificial Sequence
  Synthetic construct
gggttatgcagtgtctgtcg

SEQ ID NO: 476 - DNA, 20 bp, Artificial Sequence
  Synthetic construct
tctgtctgaagtccccgtac

SEQ ID NO: 477 - DNA, 20 bp, Artificial Sequence
  Synthetic construct
actcaatcgtgaggattggt

SEQ ID NO: 478 - DNA, 20 bp, Artificial Sequence
  Synthetic construct
actgtgtaaaatgaacaagg

SEQ ID NO: 479 - DNA, 20 bp, Artificial Sequence
  Synthetic construct
ccaacatgaccaccaacgag

SEQ ID NO: 480 - DNA, 20 bp, Artificial Sequence
  Synthetic construct
cttacctggatccattcatg

SEQ ID NO: 481 - DNA, 20 bp, Artificial Sequence
  Synthetic construct
aaaaggacggcactgagaag

SEQ ID NO: 482 - DNA, 20 bp, Artificial Sequence
  Synthetic construct
agcgctggtagggagtcagg

SEQ ID NO: 483 - DNA, 20 bp, Artificial Sequence
  Synthetic construct
ccaacacctaagagacctcg

SEQ ID NO: 484 - DNA, 20 bp, Artificial Sequence
  Synthetic construct
gctgtcccgggactcaccgg

SEQ ID NO: 485 - DNA, 20 bp, Artificial Sequence
  Synthetic construct
ccgcgggaagtagccacccg

SEQ ID NO: 486 - DNA, 20 bp, Artificial Sequence
  Synthetic construct
cggcggcggatattgcgccc

SEQ ID NO: 487 - DNA, 20 bp, Artificial Sequence
  Synthetic construct
gaggcgccgggtacatcgcg

SEQ ID NO: 488 - DNA, 20 bp, Artificial Sequence
  Synthetic construct
gggtcccaaacaactcagga

SEQ ID NO: 489 - DNA, 20 bp, Artificial Sequence
  Synthetic construct
caaggggccatggaccaaag

SEQ ID NO: 490 - DNA, 20 bp, Artificial Sequence
  Synthetic construct
ctccagcagcaagtacactg

SEQ ID NO: 491 - DNA, 20 bp, Artificial Sequence
  Synthetic construct
gcgtccagatctgtaccgat

SEQ ID NO: 492 - DNA, 20 bp, Artificial Sequence
  Synthetic construct
tcaggtcacaccaagcatca

SEQ ID NO: 493 - DNA, 20 bp, Artificial Sequence
  Synthetic construct
aaatacaccacataatagag

SEQ ID NO: 494 - DNA, 20 bp, Artificial Sequence
  Synthetic construct
gcacagacggacaaatacag

SEQ ID NO: 495 - DNA, 20 bp, Artificial Sequence
  Synthetic construct
gtgtggacttacaataaccg

SEQ ID NO: 496 - DNA, 20 bp, Artificial Sequence
  Synthetic construct
gtgtgtcaagacgctttggg

SEQ ID NO: 497 - DNA, 20 bp, Artificial Sequence
  Synthetic construct
actagaccagcacaaggtgt

SEQ ID NO: 498 - DNA, 20 bp, Artificial Sequence
  Synthetic construct
cagtttgtcagcaatctccc

SEQ ID NO: 499 - DNA, 20 bp, Artificial Sequence
  Synthetic construct
gagtgtgagtggtcccattg

SEQ ID NO: 500 - DNA, 20 bp, Artificial Sequence
  Synthetic construct
gatgtcctcatgagtgacgt

SEQ ID NO: 501 - DNA, 20 bp, Artificial Sequence
  Synthetic construct
cacaccaagctgaaacagtg

SEQ ID NO: 502 - DNA, 20 bp, Artificial Sequence
  Synthetic construct
catgcgctttcgtcacagtg

SEQ ID NO: 503 - DNA, 20 bp, Artificial Sequence
  Synthetic construct
ggtgctctcgaagtttactg

SEQ ID NO: 504 - DNA, 20 bp, Artificial Sequence
  Synthetic construct
tgactacttacgatccaatg

SEQ ID NO: 505 - DNA, 20 bp, Artificial Sequence
  Synthetic construct
caacagattatcacaaatcg

SEQ ID NO: 506 - DNA, 20 bp, Artificial Sequence
  Synthetic construct
catcatccggacaccaacag

SEQ ID NO: 507 - DNA, 20 bp, Artificial Sequence
  Synthetic construct
gtatgtgaccaatgtaccag

SEQ ID NO: 508 - DNA, 20 bp, Artificial Sequence
  Synthetic construct
ttactaccagtggatcatca

SEQ ID NO: 509 - DNA, 20 bp, Artificial Sequence
  Synthetic construct
ccattgttcaatatcgtccg

SEQ ID NO: 510 - DNA, 20 bp, Artificial Sequence
  Synthetic construct
gagcgctgctcagatagcga

SEQ ID NO: 511 - DNA, 20 bp, Artificial Sequence
  Synthetic construct
gatccactcacagtttccat

SEQ ID NO: 512 - DNA, 20 bp, Artificial Sequence
  Synthetic construct
ggtgccctatgagccgcctg

SEQ ID NO: 513 - DNA, 20 bp, Artificial Sequence
  Synthetic construct
gaagactactactggatgac

SEQ ID NO: 514 - DNA, 20 bp, Artificial Sequence
  Synthetic construct
gatcacggcggacaccacgg

SEQ ID NO: 515 - DNA, 20 bp, Artificial Sequence
  Synthetic construct
gctgcacggcgtgctcatgg

SEQ ID NO: 516 - DNA, 20 bp, Artificial Sequence
  Synthetic construct
tgaagtgaaaaaggaaccgg

SEQ ID NO: 517 - DNA, 20 bp, Artificial Sequence
  Synthetic construct
agccggtccctttcccgtcg

SEQ ID NO: 518 - DNA, 20 bp, Artificial Sequence
  Synthetic construct
cctcagttggcaaggtacct

SEQ ID NO: 519 - DNA, 20 bp, Artificial Sequence
  Synthetic construct
cctctcaatcaaaataaggt

SEQ ID NO: 520 - DNA, 20 bp, Artificial Sequence
  Synthetic construct
cgaaaatctgggctaagtgc

SEQ ID NO: 521 - DNA, 20 bp, Artificial Sequence
  Synthetic construct
gagaacctcggaacatacgg

SEQ ID NO: 522 - DNA, 20 bp, Artificial Sequence
  Synthetic construct
gcagatcgagtcctacccca

SEQ ID NO: 523 - DNA, 20 bp, Artificial Sequence
  Synthetic construct
tcttcttgtctcggcccatg

SEQ ID NO: 524 - DNA, 20 bp, Artificial Sequence
  Synthetic construct
tgagaacgcatctcagcccg

SEQ ID NO: 525 - DNA, 20 bp, Artificial Sequence
  Synthetic construct
cttactaatgaagtaatccg

SEQ ID NO: 526 - DNA, 20 bp, Artificial Sequence
  Synthetic construct
gagaaagcagtctttaccca

SEQ ID NO: 527 - DNA, 20 bp, Artificial Sequence
  Synthetic construct
ggtctcggagaatgaccgag

SEQ ID NO: 528 - DNA, 20 bp, Artificial Sequence
  Synthetic construct
tgcatggggaggaccagtcg

SEQ ID NO: 529 - DNA, 20 bp, Artificial Sequence
  Synthetic construct
accgtcagcacagccaacgt

SEQ ID NO: 530 - DNA, 20 bp, Artificial Sequence
  Synthetic construct
atcatcggacgccccaaagg

SEQ ID NO: 531 - DNA, 20 bp, Artificial Sequence
  Synthetic construct
gagtcgcgggccgacgacaa

SEQ ID NO: 532 - DNA, 20 bp, Artificial Sequence
  Synthetic construct
gccgtagtggccgttctgcg

SEQ ID NO: 533 - DNA, 20 bp, Artificial Sequence
  Synthetic construct
accaggcacacaagagactg

SEQ ID NO: 534 - DNA, 20 bp, Artificial Sequence
  Synthetic construct
agaaatacggtccgaaacgt

SEQ ID NO: 535 - DNA, 20 bp, Artificial Sequence
  Synthetic construct
agtctggaaagcgtcacttg

SEQ ID NO: 536 - DNA, 20 bp, Artificial Sequence
  Synthetic construct
tatttacatgtaacgctaca

SEQ ID NO: 537 - DNA, 20 bp, Artificial Sequence
  Synthetic construct
atgctaagtacctgtgaaag

SEQ ID NO: 538 - DNA, 20 bp, Artificial Sequence
  Synthetic construct
cattgaatatgattgcaagg

SEQ ID NO: 539 - DNA, 20 bp, Artificial Sequence
  Synthetic construct
taggtgttgatacgagccca

SEQ ID NO: 540 - DNA, 20 bp, Artificial Sequence
  Synthetic construct
tattcatagatctactgaca

SEQ ID NO: 541 - DNA, 20 bp, Artificial Sequence
  Synthetic construct
accggcagcgtcaaacaccc

SEQ ID NO: 542 - DNA, 20 bp, Artificial Sequence
  Synthetic construct
atgaccagaaaaacataaga

SEQ ID NO: 543 - DNA, 20 bp, Artificial Sequence
  Synthetic construct
ccttcatggagaaatgccgt

SEQ ID NO: 544 - DNA, 20 bp, Artificial Sequence
  Synthetic construct
ggtgcagagaaaccggcatg

SEQ ID NO: 545 - DNA, 20 bp, Artificial Sequence
  Synthetic construct
gaggcaaaaagaaatcccca

SEQ ID NO: 546 - DNA, 20 bp, Artificial Sequence
  Synthetic construct
gatttctgatgaaaaagacg

SEQ ID NO: 547 - DNA, 20 bp, Artificial Sequence
  Synthetic construct
gctctactggagcgacgagg

SEQ ID NO: 548 - DNA, 20 bp, Artificial Sequence
  Synthetic construct
tcacccaaaaaaatgcacca

SEQ ID NO: 549 - DNA, 30 bp, Artificial Sequence
  Synthetic construct
atgaaaagttctggataacaggatgggcca

SEQ ID NO: 550 - DNA, 30 bp, Artificial Sequence
  Synthetic construct
agggcgcgcggcgatcggacacgatggcgg

SEQ ID NO: 551 - DNA, 30 bp, Artificial Sequence
  Synthetic construct
ctgcgggttatgcagtgtctgtcgcggatt

SEQ ID NO: 552 - DNA, 30 bp, Artificial Sequence
  Synthetic construct
cggatctgtctgaagtccccgtaccggcta

SEQ ID NO: 553 - DNA, 30 bp, Artificial Sequence
  Synthetic construct
tgacactcaatcgtgaggattggtcggtgt

SEQ ID NO: 554 - DNA, 30 bp, Artificial Sequence
  Synthetic construct
aggaactgtgtaaaatgaacaaggaggact

SEQ ID NO: 555 - DNA, 30 bp, Artificial Sequence
  Synthetic construct
cctcccaacatgaccaccaacgagaggaga

SEQ ID NO: 556 - DNA, 30 bp, Artificial Sequence
  Synthetic construct
tgagcttacctggatccattcatgtggtca

SEQ ID NO: 557 - DNA, 30 bp, Artificial Sequence
  Synthetic construct
caggaaaaggacggcactgagaagcggggc

SEQ ID NO: 558 - DNA, 30 bp, Artificial Sequence
  Synthetic construct
ggacagcgctggtagggagtcaggtgggtg

SEQ ID NO: 559 - DNA, 30 bp, Artificial Sequence
  Synthetic construct
agtgccaacacctaagagacctcggggccg

SEQ ID NO: 560 - DNA, 30 bp, Artificial Sequence
  Synthetic construct
cagcgctgtcccgggactcaccggaggctg

SEQ ID NO: 561 - DNA, 30 bp, Artificial Sequence
  Synthetic construct
cggtccgcgggaagtagccacccgaggagc

SEQ ID NO: 562 - DNA, 30 bp, Artificial Sequence
  Synthetic construct
cgggcggcggcggatattgcgccccggagg

SEQ ID NO: 563 - DNA, 30 bp, Artificial Sequence
  Synthetic construct
tactgaggcgccgggtacatcgcggggtac

SEQ ID NO: 564 - DNA, 30 bp, Artificial Sequence
  Synthetic construct
tcccgggtcccaaacaactcaggaaggagg

SEQ ID NO: 565 - DNA, 30 bp, Artificial Sequence
  Synthetic construct
ttgtcaaggggccatggaccaaagaggaag

SEQ ID NO: 566 - DNA, 30 bp, Artificial Sequence
  Synthetic construct
cgagctccagcagcaagtacactgggggct

SEQ ID NO: 567 - DNA, 30 bp, Artificial Sequence
  Synthetic construct
cactgcgtccagatctgtaccgatgggctc

SEQ ID NO: 568 - DNA, 30 bp, Artificial Sequence
  Synthetic construct
ttactcaggtcacaccaagcatcagggtcc

SEQ ID NO: 569 - DNA, 30 bp, Artificial Sequence
  Synthetic construct
cggtaaatacaccacataatagagaggctg

SEQ ID NO: 570 - DNA, 30 bp, Artificial Sequence
  Synthetic construct
ttctgcacagacggacaaatacagaggaga

SEQ ID NO: 571 - DNA, 30 bp, Artificial Sequence
  Synthetic construct
agctgtgtggacttacaataaccgaggagg

SEQ ID NO: 572 - DNA, 30 bp, Artificial Sequence
  Synthetic construct
gaacgtgtgtcaagacgctttgggcggagt

SEQ ID NO: 573 - DNA, 30 bp, Artificial Sequence
  Synthetic construct
aagaactagaccagcacaaggtgtgggtgc

SEQ ID NO: 574 - DNA, 30 bp, Artificial Sequence
  Synthetic construct
caatcagtttgtcagcaatctcccgggtat

SEQ ID NO: 575 - DNA, 30 bp, Artificial Sequence
  Synthetic construct
tgaagagtgtgagtggtcccattgaggttc

SEQ ID NO: 576 - DNA, 30 bp, Artificial Sequence
  Synthetic construct
tgcagatgtcctcatgagtgacgtaggcca

SEQ ID NO: 577 - DNA, 30 bp, Artificial Sequence
  Synthetic construct
ctaccacaccaagctgaaacagtgggggct

SEQ ID NO: 578 - DNA, 30 bp, Artificial Sequence
  Synthetic construct
accacatgcgctttcgtcacagtgaggacc

SEQ ID NO: 579 - DNA, 30 bp, Artificial Sequence
  Synthetic construct
cggaggtgctctcgaagtttactgcggtcc

SEQ ID NO: 580 - DNA, 30 bp, Artificial Sequence
  Synthetic construct
cctctgactacttacgatccaatgaggtct

SEQ ID NO: 581 - DNA, 30 bp, Artificial Sequence
  Synthetic construct
aaaccaacagattatcacaaatcgaggaag

SEQ ID NO: 582 - DNA, 30 bp, Artificial Sequence
  Synthetic construct
ccatcatcatccggacaccaacagtggggc

SEQ ID NO: 583 - DNA, 30 bp, Artificial Sequence
  Synthetic construct
ctcagtatgtgaccaatgtaccagtggccc

SEQ ID NO: 584 - DNA, 30 bp, Artificial Sequence
  Synthetic construct
aactttactaccagtggatcatcagggacc

SEQ ID NO: 585 - DNA, 30 bp, Artificial Sequence
  Synthetic construct
tgaaccattgttcaatatcgtccggggaca

SEQ ID NO: 586 - DNA, 30 bp, Artificial Sequence
  Synthetic construct
ccatgagcgctgctcagatagcgatggtga

SEQ ID NO: 587 - DNA, 30 bp, Artificial Sequence
  Synthetic construct
aatggatccactcacagtttccataggtct

SEQ ID NO: 588 - DNA, 30 bp, Artificial Sequence
  Synthetic construct
tggtggtgccctatgagccgcctgaggtct

SEQ ID NO: 589 - DNA, 30 bp, Artificial Sequence
  Synthetic construct
cctggaagactactactggatgaccggcta

SEQ ID NO: 590 - DNA, 30 bp, Artificial Sequence
  Synthetic construct
cggcgatcacggcggacaccacggcggcgg

SEQ ID NO: 591 - DNA, 30 bp, Artificial Sequence
  Synthetic construct
ccgagctgcacggcgtgctcatgggggtgg

SEQ ID NO: 592 - DNA, 30 bp, Artificial Sequence
  Synthetic construct
agtttgaagtgaaaaaggaaccggtggaga

SEQ ID NO: 593 - DNA, 30 bp, Artificial Sequence
  Synthetic construct
cgggagccggtccctttcccgtcggggagc

SEQ ID NO: 594 - DNA, 30 bp, Artificial Sequence
  Synthetic construct
caagcctcagttggcaaggtacctgggaaa

SEQ ID NO: 595 - DNA, 30 bp, Artificial Sequence
  Synthetic construct
cgatcctctcaatcaaaataaggttggtta

SEQ ID NO: 596 - DNA, 30 bp, Artificial Sequence
  Synthetic construct
gatccgaaaatctgggctaagtgctggcaa

SEQ ID NO: 597 - DNA, 30 bp, Artificial Sequence
  Synthetic construct
tacagagaacctcggaacatacggaggtag

SEQ ID NO: 598 - DNA, 30 bp, Artificial Sequence
  Synthetic construct
gacagcagatcgagtcctaccccacggaca

SEQ ID NO: 599 - DNA, 30 bp, Artificial Sequence
  Synthetic construct
gttctcttcttgtctcggcccatgcggttc

SEQ ID NO: 600 - DNA, 30 bp, Artificial Sequence
  Synthetic construct
tccatgagaacgcatctcagcccgaggtgc

SEQ ID NO: 601 - DNA, 30 bp, Artificial Sequence
  Synthetic construct
tgaacttactaatgaagtaatccgaggtat

SEQ ID NO: 602 - DNA, 30 bp, Artificial Sequence
  Synthetic construct
gctcgagaaagcagtctttacccagggcgc

SEQ ID NO: 603 - DNA, 30 bp, Artificial Sequence
  Synthetic construct
agagggtctcggagaatgaccgaggggtag

SEQ ID NO: 604 - DNA, 30 bp, Artificial Sequence
  Synthetic construct
catgtgcatggggaggaccagtcgtggtag

SEQ ID NO: 605 - DNA, 30 bp, Artificial Sequence
  Synthetic construct
gctcaccgtcagcacagccaacgtgggtga

SEQ ID NO: 606 - DNA, 30 bp, Artificial Sequence
  Synthetic construct
ggtcatcatcggacgccccaaaggcggacc

SEQ ID NO: 607 - DNA, 30 bp, Artificial Sequence
  Synthetic construct
cgaggagtcgcgggccgacgacaagggcgt

SEQ ID NO: 608 - DNA, 30 bp, Artificial Sequence
  Synthetic construct
cgcggccgtagtggccgttctgcgtggcgg

SEQ ID NO: 609 - DNA, 30 bp, Artificial Sequence
  Synthetic construct
atttaccaggcacacaagagactggggaac

SEQ ID NO: 610 - DNA, 30 bp, Artificial Sequence
  Synthetic construct
gtacagaaatacggtccgaaacgttggtct

SEQ ID NO: 611 - DNA, 30 bp, Artificial Sequence
  Synthetic construct
cccaagtctggaaagcgtcacttggggaaa

SEQ ID NO: 612 - DNA, 30 bp, Artificial Sequence
  Synthetic construct
actatatttacatgtaacgctacagggtat

SEQ ID NO: 613 - DNA, 30 bp, Artificial Sequence
  Synthetic construct
ttctatgctaagtacctgtgaaagggggca

SEQ ID NO: 614 - DNA, 30 bp, Artificial Sequence
  Synthetic construct
acgccattgaatatgattgcaaggaggagc

SEQ ID NO: 615 - DNA, 30 bp, Artificial Sequence
  Synthetic construct
ctgataggtgttgatacgagcccagggtgc

SEQ ID NO: 616 - DNA, 30 bp, Artificial Sequence
  Synthetic construct
ggcttattcatagatctactgacaggggga

SEQ ID NO: 617 - DNA, 30 bp, Artificial Sequence
  Synthetic construct
agagaccggcagcgtcaaacaccctggtgg

SEQ ID NO: 618 - DNA, 30 bp, Artificial Sequence
  Synthetic construct
gcttatgaccagaaaaacataagacggcgc

SEQ ID NO: 619 - DNA, 30 bp, Artificial Sequence
  Synthetic construct
cagaccttcatggagaaatgccgtaggccc

SEQ ID NO: 620 - DNA, 30 bp, Artificial Sequence
  Synthetic construct
acctggtgcagagaaaccggcatgcggagc

SEQ ID NO: 621 - DNA, 30 bp, Artificial Sequence
  Synthetic construct
agatgaggcaaaaagaaatccccagggtcc

SEQ ID NO: 622 - DNA, 30 bp, Artificial Sequence
  Synthetic construct
cacagatttctgatgaaaaagacgaggatg

SEQ ID NO: 623 - DNA, 30 bp, Artificial Sequence
  Synthetic construct
acctgctctactggagcgacgaggaggccg

SEQ ID NO: 624 - DNA, 30 bp, Artificial Sequence
  Synthetic construct
gccgtcacccaaaaaaatgcaccaggggaa

SEQ ID NO: 625 - DNA, 20 bp, Artificial Sequence
  Synthetic construct
agagcgtgcagataatgaca

SEQ ID NO: 626 - DNA, 20 bp, Artificial Sequence
  Synthetic construct
agctggcagaccacaaactg

SEQ ID NO: 627 - DNA, 20 bp, Artificial Sequence
  Synthetic construct
attcttcataccaggaccag

SEQ ID NO: 628 - DNA, 20 bp, Artificial Sequence
  Synthetic construct
ccaattcaggacccacacga

SEQ ID NO: 629 - DNA, 20 bp, Artificial Sequence
  Synthetic construct
aggtaccctccgacccacca

SEQ ID NO: 630 - DNA, 20 bp, Artificial Sequence
  Synthetic construct
cagggagtgtgtgaactgtg

SEQ ID NO: 631 - DNA, 20 bp, Artificial Sequence
  Synthetic construct
ggagctgtactcgggcacgt

SEQ ID NO: 632 - DNA, 20 bp, Artificial Sequence
  Synthetic construct
tccaagacgtccatccacca

SEQ ID NO: 633 - DNA, 20 bp, Artificial Sequence
  Synthetic construct
cagccaggacaacaatgcga

SEQ ID NO: 634 - DNA, 20 bp, Artificial Sequence
  Synthetic construct
gtggccttaatgttctcctg

SEQ ID NO: 635 - DNA, 20 bp, Artificial Sequence
  Synthetic construct
gttcattgtacaatatatgg

SEQ ID NO: 636 - DNA, 20 bp, Artificial Sequence
  Synthetic construct
taagaggtcagaccgtcgtg

SEQ ID NO: 637 - DNA, 20 bp, Artificial Sequence
  Synthetic construct
acactggaacatatcaagac

SEQ ID NO: 638 - DNA, 20 bp, Artificial Sequence
  Synthetic construct
gacaaatgcaatgaaaactg

SEQ ID NO: 639 - DNA, 20 bp, Artificial Sequence
  Synthetic construct
ggacatcgtgtaccgcacca

SEQ ID NO: 640 - DNA, 20 bp, Artificial Sequence
  Synthetic construct
ggccgcccgggaagtcaaca

SEQ ID NO: 641 - DNA, 20 bp, Artificial Sequence
  Synthetic construct
agaggaggagacacatgtcg

SEQ ID NO: 642 - DNA, 20 bp, Artificial Sequence
  Synthetic construct
catacaccatgtccatagag

SEQ ID NO: 643 - DNA, 20 bp, Artificial Sequence
  Synthetic construct
gccttctgacaattcagccc

SEQ ID NO: 644 - DNA, 20 bp, Artificial Sequence
  Synthetic construct
gttctgtagacttcacatgc

SEQ ID NO: 645 - DNA, 20 bp, Artificial Sequence
  Synthetic construct
acccaggcatcatccgacaa

SEQ ID NO: 646 - DNA, 20 bp, Artificial Sequence
  Synthetic construct
cccacccacagggatcaacg

SEQ ID NO: 647 - DNA, 20 bp, Artificial Sequence
  Synthetic construct
cctacttaggcactgccagg

SEQ ID NO: 648 - DNA, 20 bp, Artificial Sequence
  Synthetic construct
gagggtgccaccatgactag

SEQ ID NO: 649 - DNA, 20 bp, Artificial Sequence
  Synthetic construct
aagtcgacatactctcggct

SEQ ID NO: 650 - DNA, 20 bp, Artificial Sequence
  Synthetic construct
cctgcctcacctcacactcg

SEQ ID NO: 651 - DNA, 20 bp, Artificial Sequence
  Synthetic construct
gccgacttacgatttccgag

SEQ ID NO: 652 - DNA, 20 bp, Artificial Sequence
  Synthetic construct
ggagtctgtgttatctggaa

SEQ ID NO: 653 - DNA, 20 bp, Artificial Sequence
  Synthetic construct
acaggttgccccacgcgttg

SEQ ID NO: 654 - DNA, 20 bp, Artificial Sequence
  Synthetic construct
ggagtttagccagtccaact

SEQ ID NO: 655 - DNA, 20 bp, Artificial Sequence
  Synthetic construct
ggtggcgcaaacgagtagca

SEQ ID NO: 656 - DNA, 20 bp, Artificial Sequence
  Synthetic construct
tagcatttgagctagttcga

SEQ ID NO: 657 - DNA, 20 bp, Artificial Sequence
  Synthetic construct
aatcagatgacaatgagtca

SEQ ID NO: 658 - DNA, 20 bp, Artificial Sequence
  Synthetic construct
caatacaatatgccacaggg

SEQ ID NO: 659 - DNA, 20 bp, Artificial Sequence
  Synthetic construct
cctaaccatatgcctatgca

SEQ ID NO: 660 - DNA, 20 bp, Artificial Sequence
  Synthetic construct
ggcatgttgtgagagcgtgg

SEQ ID NO: 661 - DNA, 20 bp, Artificial Sequence
  Synthetic construct
atcacacatagcgacgaagt

SEQ ID NO: 662 - DNA, 20 bp, Artificial Sequence
  Synthetic construct
cagagcatctctagctaacg

SEQ ID NO: 663 - DNA, 20 bp, Artificial Sequence
  Synthetic construct
ctaactctgctacccaagtg

SEQ ID NO: 664 - DNA, 20 bp, Artificial Sequence
  Synthetic construct
taatgttaatccgagaacgg

SEQ ID NO: 665 - DNA, 20 bp, Artificial Sequence
  Synthetic construct
cctgccaagaaggatgtcaa

SEQ ID NO: 666 - DNA, 20 bp, Artificial Sequence
  Synthetic construct
ctcaaagccacagtcgacaa

SEQ ID NO: 667 - DNA, 20 bp, Artificial Sequence
  Synthetic construct
gaggctcttatttcgagcca

SEQ ID NO: 668 - DNA, 20 bp, Artificial Sequence
  Synthetic construct
gataagatgcttgaacagct

SEQ ID NO: 669 - DNA, 20 bp, Artificial Sequence
  Synthetic construct
acctactgaaccctcctccg

SEQ ID NO: 670 - DNA, 20 bp, Artificial Sequence
  Synthetic construct
gcggatcagaaaggtgccgg

SEQ ID NO: 671 - DNA, 20 bp, Artificial Sequence
  Synthetic construct
tcagcgtcaagacccagtct

SEQ ID NO: 672 - DNA, 20 bp, Artificial Sequence
  Synthetic construct
ttgagcacgcagtcgaagcg

SEQ ID NO: 673 - DNA, 20 bp, Artificial Sequence
  Synthetic construct
aggcgtgcggatgtagacct

SEQ ID NO: 674 - DNA, 20 bp, Artificial Sequence
  Synthetic construct
cttgttagtcttagacagcg

SEQ ID NO: 675 - DNA, 20 bp, Artificial Sequence
  Synthetic construct
tgccaatatccagtaccagg

SEQ ID NO: 676 - DNA, 20 bp, Artificial Sequence
  Synthetic construct
ttgatagggacaagtttccg

SEQ ID NO: 677 - DNA, 20 bp, Artificial Sequence
  Synthetic construct
acattctgtacaatgaacag

SEQ ID NO: 678 - DNA, 20 bp, Artificial Sequence
  Synthetic construct
atcaagcgtgctgaccggcg

SEQ ID NO: 679 - DNA, 20 bp, Artificial Sequence
  Synthetic construct
cagccaggaccacaatgcca

SEQ ID NO: 680 - DNA, 20 bp, Artificial Sequence
  Synthetic construct
cgtgcacatgaatccccccc

SEQ ID NO: 681 - DNA, 20 bp, Artificial Sequence
  Synthetic construct
cgggacacgtctacttggtg

SEQ ID NO: 682 - DNA, 20 bp, Artificial Sequence
  Synthetic construct
gcagaacgaggctgccctag

SEQ ID NO: 683 - DNA, 20 bp, Artificial Sequence
  Synthetic construct
gcggaccagtgtacagcacg

SEQ ID NO: 684 - DNA, 20 bp, Artificial Sequence
  Synthetic construct
taaggtgaggactttgcaca

SEQ ID NO: 685 - DNA, 20 bp, Artificial Sequence
  Synthetic construct
aaggaaagagtctactgtcg

SEQ ID NO: 686 - DNA, 20 bp, Artificial Sequence
  Synthetic construct
agatgtgagtggatctatcg

SEQ ID NO: 687 - DNA, 20 bp, Artificial Sequence
  Synthetic construct
ccttacctgaatcaatactg

SEQ ID NO: 688 - DNA, 20 bp, Artificial Sequence
  Synthetic construct
gttatctataagacaccttg

SEQ ID NO: 689 - DNA, 20 bp, Artificial Sequence
  Synthetic construct
acttcggcaagactttgagg

SEQ ID NO: 690 - DNA, 20 bp, Artificial Sequence
  Synthetic construct
gcatcgcaccatgtctcagg

SEQ ID NO: 691 - DNA, 20 bp, Artificial Sequence
  Synthetic construct
ggagggcactaccactacgc

SEQ ID NO: 692 - DNA, 20 bp, Artificial Sequence
  Synthetic construct
tcggttgacaatcaatagtg

SEQ ID NO: 693 - DNA, 30 bp, Artificial Sequence; identical to SEQ ID NO: 389
  Synthetic construct

SEQ ID NO: 694 - DNA, 30 bp, Artificial Sequence; identical to SEQ ID NO: 390
  Synthetic construct

SEQ ID NO: 695 - DNA, 30 bp, Artificial Sequence; identical to SEQ ID NO: 391
  Synthetic construct

SEQ ID NO: 696 - DNA, 30 bp, Artificial Sequence; identical to SEQ ID NO: 392
  Synthetic construct

SEQ ID NO: 697 - DNA, 30 bp, Artificial Sequence
  Synthetic construct
gcagaggtaccctccgacccaccacggtga

SEQ ID NO: 698 - DNA, 30 bp, Artificial Sequence
  Synthetic construct
aaggcagggagtgtgtgaactgtggggcaa

SEQ ID NO: 699 - DNA, 30 bp, Artificial Sequence
  Synthetic construct
gtccggagctgtactcgggcacgtagggcg

SEQ ID NO: 700 - DNA, 30 bp, Artificial Sequence
  Synthetic construct
cttctccaagacgtccatccaccacggctc

SEQ ID NO: 701 - DNA, 30 bp, Artificial Sequence
  Synthetic construct
atggcagccaggacaacaatgcgacggcca

SEQ ID NO: 702 - DNA, 30 bp, Artificial Sequence
  Synthetic construct
ctgggtggccttaatgttctcctgtggatt

SEQ ID NO: 703 - DNA, 30 bp, Artificial Sequence
  Synthetic construct
ctctgttcattgtacaatatatggcggatg

SEQ ID NO: 704 - DNA, 30 bp, Artificial Sequence
  Synthetic construct
gaattaagaggtcagaccgtcgtggggcag

SEQ ID NO: 705 - DNA, 30 bp, Artificial Sequence; identical to SEQ ID NO: 413
  Synthetic construct

SEQ ID NO: 706 - DNA, 30 bp, Artificial Sequence; identical to SEQ ID NO: 414
  Synthetic construct

SEQ ID NO: 707 - DNA, 30 bp, Artificial Sequence; identical to SEQ ID NO: 415
  Synthetic construct

SEQ ID NO: 708 - DNA, 30 bp, Artificial Sequence; identical to SEQ ID NO: 416
  Synthetic construct

SEQ ID NO: 709 - DNA, 30 bp, Artificial Sequence; identical to SEQ ID NO: 385
  Synthetic construct

SEQ ID NO: 710 - DNA, 30 bp, Artificial Sequence; identical to SEQ ID NO: 386
  Synthetic construct

SEQ ID NO: 711 - DNA, 30 bp, Artificial Sequence; identical to SEQ ID NO: 387
  Synthetic construct

SEQ ID NO: 712 - DNA, 30 bp, Artificial Sequence; identical to SEQ ID NO: 388
  Synthetic construct

SEQ ID NO: 713 - DNA, 30 bp, Artificial Sequence
  Synthetic construct
cctcacccaggcatcatccgacaagggctc

SEQ ID NO: 714 - DNA, 30 bp, Artificial Sequence
  Synthetic construct
tgtccccacccacagggatcaacgtggcca

SEQ ID NO: 715 - DNA, 30 bp, Artificial Sequence
  Synthetic construct
tctccctacttaggcactgccaggcggacc

SEQ ID NO: 716 - DNA, 30 bp, Artificial Sequence
  Synthetic construct
cccggagggtgccaccatgactaggggcag

SEQ ID NO: 717 - DNA, 30 bp, Artificial Sequence
  Synthetic construct
ttctaagtcgacatactctcggctaggtgt

SEQ ID NO: 718 - DNA, 30 bp, Artificial Sequence
  Synthetic construct
cccgcctgcctcacctcacactcgcggctc

SEQ ID NO: 719 - DNA, 30 bp, Artificial Sequence
  Synthetic construct
gccagccgacttacgatttccgagcggccg

SEQ ID NO: 720 - DNA, 30 bp, Artificial Sequence
  Synthetic construct
gaatggagtctgtgttatctggaaaggctg

SEQ ID NO: 721 - DNA, 30 bp, Artificial Sequence; identical to SEQ ID NO: 393
  Synthetic construct

SEQ ID NO: 722 - DNA, 30 bp, Artificial Sequence; identical to SEQ ID NO: 394
  Synthetic construct

SEQ ID NO: 723 - DNA, 30 bp, Artificial Sequence; identical to SEQ ID NO: 395
  Synthetic construct

SEQ ID NO: 724 - DNA, 30 bp, Artificial Sequence; identical to SEQ ID NO: 396
  Synthetic construct

SEQ ID NO: 725 - DNA, 30 bp, Artificial Sequence
  Synthetic construct
acagaatcagatgacaatgagtcagggaca

SEQ ID NO: 726 - DNA, 30 bp, Artificial Sequence
  Synthetic construct
tcagcaatacaatatgccacagggaggcgg

SEQ ID NO: 727 - DNA, 30 bp, Artificial Sequence
  Synthetic construct
agggcctaaccatatgcctatgcagggacc

SEQ ID NO: 728 - DNA, 30 bp, Artificial Sequence
  Synthetic construct
tgaaggcatgttgtgagagcgtggaggtgg

SEQ ID NO: 729 - DNA, 30 bp, Artificial Sequence; identical to SEQ ID NO: 425
  Synthetic construct

SEQ ID NO: 730 - DNA, 30 bp, Artificial Sequence; identical to SEQ ID NO: 426
  Synthetic construct

SEQ ID NO: 731 - DNA, 30 bp, Artificial Sequence; identical to SEQ ID NO: 427
  Synthetic construct

SEQ ID NO: 732 - DNA, 30 bp, Artificial Sequence; identical to SEQ ID NO: 428
  Synthetic construct

SEQ ID NO: 733 - DNA, 30 bp, Artificial Sequence
  Synthetic construct
ggcccctgccaagaaggatgtcaagggctc

SEQ ID NO: 734 - DNA, 30 bp, Artificial Sequence
  Synthetic construct
gatgctcaaagccacagtcgacaatggccc

SEQ ID NO: 735 - DNA, 30 bp, Artificial Sequence
  Synthetic construct
ggttgaggctcttatttcgagccagggcta

SEQ ID NO: 736 - DNA, 30 bp, Artificial Sequence
  Synthetic construct
atgtgataagatgcttgaacagctcggtga

SEQ ID NO: 737 - DNA, 30 bp, Artificial Sequence
  Synthetic construct
cgccacctactgaaccctcctccgaggtgc

SEQ ID NO: 738 - DNA, 30 bp, Artificial Sequence
  Synthetic construct
tgtcgcggatcagaaaggtgccggcgggct

SEQ ID NO: 739 - DNA, 30 bp, Artificial Sequence
  Synthetic construct
acgctcagcgtcaagacccagtctgggacc

SEQ ID NO: 740 - DNA, 30 bp, Artificial Sequence
  Synthetic construct
cagcttgagcacgcagtcgaagcggggcac

SEQ ID NO: 741 - DNA, 30 bp, Artificial Sequence
  Synthetic construct
cggaaggcgtgcggatgtagacctgggagg

SEQ ID NO: 742 - DNA, 30 bp, Artificial Sequence
  Synthetic construct
ctttcttgttagtcttagacagcggggttg

SEQ ID NO: 743 - DNA, 30 bp, Artificial Sequence
  Synthetic construct
caaatgccaatatccagtaccaggcggtcc

SEQ ID NO: 744 - DNA, 30 bp, Artificial Sequence
  Synthetic construct
aggtttgatagggacaagtttccgcggtgt

SEQ ID NO: 745 - DNA, 30 bp, Artificial Sequence
  Synthetic construct
cggcacattctgtacaatgaacagaggctg

SEQ ID NO: 746 - DNA, 30 bp, Artificial Sequence
  Synthetic construct
gaggatcaagcgtgctgaccggcggggtgc

SEQ ID NO: 747 - DNA, 30 bp, Artificial Sequence
  Synthetic construct
acggcagccaggaccacaatgccacggcta

SEQ ID NO: 748 - DNA, 30 bp, Artificial Sequence
  Synthetic construct
tgaacgtgcacatgaatcccccccaggtga

SEQ ID NO: 749 - DNA, 30 bp, Artificial Sequence; identical to SEQ ID NO: 429
  Synthetic construct

SEQ ID NO: 750 - DNA, 30 bp, Artificial Sequence; identical to SEQ ID NO: 430
  Synthetic construct

SEQ ID NO: 751 - DNA, 30 bp, Artificial Sequence; identical to SEQ ID NO: 431
  Synthetic construct

SEQ ID NO: 752 - DNA, 30 bp, Artificial Sequence; identical to SEQ ID NO: 432
  Synthetic construct

SEQ ID NO: 753 - DNA, 30 bp, Artificial Sequence
  Synthetic construct
aacaaaggaaagagtctactgtcggggaac

SEQ ID NO: 754 - DNA, 30 bp, Artificial Sequence
  Synthetic construct
caaaagatgtgagtggatctatcgaggctc

SEQ ID NO: 755 - DNA, 30 bp, Artificial Sequence
  Synthetic construct
catcccttacctgaatcaatactgaggaca

SEQ ID NO: 756 - DNA, 30 bp, Artificial Sequence
  Synthetic construct
tcatgttatctataagacaccttgtggtct

SEQ ID NO: 757 - DNA, 30 bp, Artificial Sequence
  Synthetic construct
agaaacttcggcaagactttgaggaggtca

SEQ ID NO: 758 - DNA, 30 bp, Artificial Sequence
  Synthetic construct
aaaagcatcgcaccatgtctcaggaggtac

SEQ ID NO: 759 - DNA, 30 bp, Artificial Sequence
  Synthetic construct
tgcaggagggcactaccactacgcaggcgt

SEQ ID NO: 760 - DNA, 30 bp, Artificial Sequence
  Synthetic construct
agtatcggttgacaatcaatagtgaggcat

SEQ ID NO: 761 - DNA, 20 bp, Artificial Sequence
  Synthetic construct
ccggggctggtacttatgga

SEQ ID NO: 762 - DNA, 20 bp, Artificial Sequence
  Synthetic construct
cctggggtctccctacccgg

SEQ ID NO: 763 - DNA, 20 bp, Artificial Sequence
  Synthetic construct
gcggtaccagagcggcaagt

SEQ ID NO: 764 - DNA, 20 bp, Artificial Sequence
  Synthetic construct
taaacttggaccacaacagg

SEQ ID NO: 765 - DNA, 20 bp, Artificial Sequence
  Synthetic construct
aactcacatgtcctcgtcgg

SEQ ID NO: 766 - DNA, 20 bp, Artificial Sequence
  Synthetic construct
acagctctacgaactcgacg

SEQ ID NO: 767 - DNA, 20 bp, Artificial Sequence
  Synthetic construct
atagacagcaaccgacggga

SEQ ID NO: 768 - DNA, 20 bp, Artificial Sequence
  Synthetic construct
gctgtggcgtgagatcacca

SEQ ID NO: 769 - DNA, 20 bp, Artificial Sequence
  Synthetic construct
aagagagctattcgtctggg

SEQ ID NO: 770 - DNA, 20 bp, Artificial Sequence
  Synthetic construct
agctgggtcggagaacaaca

SEQ ID NO: 771 - DNA, 20 bp, Artificial Sequence
  Synthetic construct
gccaggacagcagacaagtg

SEQ ID NO: 772 - DNA, 20 bp, Artificial Sequence
  Synthetic construct
tgcttaccccataacttgtg

SEQ ID NO: 773 - DNA, 20 bp, Artificial Sequence
  Synthetic construct
ccattgttcaatatcgtccg

SEQ ID NO: 774 - DNA, 20 bp, Artificial Sequence
  Synthetic construct
gagcgctgctcagatagcga

SEQ ID NO: 775 - DNA, 20 bp, Artificial Sequence
  Synthetic construct
gatccactcacagtttccat

SEQ ID NO: 776 - DNA, 20 bp, Artificial Sequence
  Synthetic construct
ggtgccctatgagccgcctg

SEQ ID NO: 777 - DNA, 20 bp, Artificial Sequence
  Synthetic construct
agctgtactagagttacggt

SEQ ID NO: 778 - DNA, 20 bp, Artificial Sequence
  Synthetic construct
ggctaacaatggtaccgatg

SEQ ID NO: 779 - DNA, 20 bp, Artificial Sequence
  Synthetic construct
tggagttggcaccgttacag

SEQ ID NO: 780 - DNA, 20 bp, Artificial Sequence
  Synthetic construct
tgtggagactgaataactga

SEQ ID NO: 781 - DNA, 20 bp, Artificial Sequence
  Synthetic construct
ccgacctcgagtccccgcag

SEQ ID NO: 782 - DNA, 20 bp, Artificial Sequence
  Synthetic construct
cgtggtggcgcggatcctag

SEQ ID NO: 783 - DNA, 20 bp, Artificial Sequence
  Synthetic construct
cgtgtccatgtcgagccgcg

SEQ ID NO: 784 - DNA, 20 bp, Artificial Sequence
  Synthetic construct
gagttctcaggtgcgccttg

SEQ ID NO: 785 - DNA, 20 bp, Artificial Sequence
  Synthetic construct
cgggacacgtctacttggtg

SEQ ID NO: 786 - DNA, 20 bp, Artificial Sequence
  Synthetic construct
gcagaacgaggctgccctag

SEQ ID NO: 787 - DNA, 20 bp, Artificial Sequence
  Synthetic construct
gcggaccagtgtacagcacg

SEQ ID NO: 788 - DNA, 20 bp, Artificial Sequence
  Synthetic construct
taaggtgaggactttgcaca

SEQ ID NO: 789 - DNA, 20 bp, Artificial Sequence
  Synthetic construct
agtacctggtcacaaaagta

SEQ ID NO: 790 - DNA, 20 bp, Artificial Sequence
  Synthetic construct
cttcctccagatgtggcatg

SEQ ID NO: 791 - DNA, 20 bp, Artificial Sequence
  Synthetic construct
gcgccgagttccactacacc

SEQ ID NO: 792 - DNA, 20 bp, Artificial Sequence
  Synthetic construct
gctgggcaggtattcgtgct

SEQ ID NO: 793 - DNA, 20 bp, Artificial Sequence
  Synthetic construct
acttcggcaagactttgagg

SEQ ID NO: 794 - DNA, 20 bp, Artificial Sequence
  Synthetic construct
gcatcgcaccatgtctcagg

SEQ ID NO: 795 - DNA, 20 bp, Artificial Sequence
  Synthetic construct
ggagggcactaccactacgc

SEQ ID NO: 796 - DNA, 20 bp, Artificial Sequence
  Synthetic construct
tcggttgacaatcaatagtg

SEQ ID NO: 797 - DNA, 20 bp, Artificial Sequence
  Synthetic construct
accggcagcgtcaaacaccc

SEQ ID NO: 798 - DNA, 20 bp, Artificial Sequence
  Synthetic construct
atgaccagaaaaacataaga

SEQ ID NO: 799 - DNA, 20 bp, Artificial Sequence
  Synthetic construct
ccttcatggagaaatgccgt

SEQ ID NO: 800 - DNA, 20 bp, Artificial Sequence
  Synthetic construct
ggtgcagagaaaccggcatg

SEQ ID NO: 801 - DNA, 20 bp, Artificial Sequence
  Synthetic construct
acaacgataccaataggttg

SEQ ID NO: 802 - DNA, 20 bp, Artificial Sequence
  Synthetic construct
agctgaatcactgataacaa

SEQ ID NO: 803 - DNA, 20 bp, Artificial Sequence
  Synthetic construct
ctggattcggaataccctag

SEQ ID NO: 804 - DNA, 20 bp, Artificial Sequence
  Synthetic construct
gaagcgggctaattccaaga

SEQ ID NO: 805 - DNA, 20 bp, Artificial Sequence
  Synthetic construct
cactgcggcccacgaagcga

SEQ ID NO: 806 - DNA, 20 bp, Artificial Sequence
  Synthetic construct
ccccaggatgcattatcccg

SEQ ID NO: 807 - DNA, 20 bp, Artificial Sequence
  Synthetic construct
ccgtgccgtaccttggattg

SEQ ID NO: 808 - DNA, 20 bp, Artificial Sequence
  Synthetic construct
tcggtggtaggtcgccactt

SEQ ID NO: 809 - DNA, 20 bp, Artificial Sequence
  Synthetic construct
aaacggtcagcccgcatgtg

SEQ ID NO: 810 - DNA, 20 bp, Artificial Sequence
  Synthetic construct
agaaggaggagcgatacaag

SEQ ID NO: 811 - DNA, 20 bp, Artificial Sequence
  Synthetic construct
atgcgccctaacttctgtga

SEQ ID NO: 812 - DNA, 20 bp, Artificial Sequence
  Synthetic construct
ccaagctagagattcgctat

SEQ ID NO: 813 - DNA, 20 bp, Artificial Sequence
  Synthetic construct
aagatgaactgcgatgtgtg

SEQ ID NO: 814 - DNA, 20 bp, Artificial Sequence
  Synthetic construct
caagcagagaagttcccttg

SEQ ID NO: 815 - DNA, 20 bp, Artificial Sequence
  Synthetic construct
gctcatacagacccgcatga

SEQ ID NO: 816 - DNA, 20 bp, Artificial Sequence
  Synthetic construct
ggacagattagcaagcaatg

SEQ ID NO: 817 - DNA, 20 bp, Artificial Sequence
  Synthetic construct
aggatgcggatatgactctg

SEQ ID NO: 818 - DNA, 20 bp, Artificial Sequence
  Synthetic construct
ggacgcgttcaagtaagcgt

SEQ ID NO: 819 - DNA, 20 bp, Artificial Sequence
  Synthetic construct
ggggagcgagtgatgtacgt

SEQ ID NO: 820 - DNA, 20 bp, Artificial Sequence
  Synthetic construct
tttggacagatctattccag

SEQ ID NO: 821 - DNA, 20 bp, Artificial Sequence
  Synthetic construct
gaaaatgaatggctcccaca

SEQ ID NO: 822 - DNA, 20 bp, Artificial Sequence
  Synthetic construct
gatggcttggtccatcacgt

SEQ ID NO: 823 - DNA, 20 bp, Artificial Sequence
  Synthetic construct
ggggcctcattcacccagaa

SEQ ID NO: 824 - DNA, 20 bp, Artificial Sequence
  Synthetic construct
tccaagagtgacagagtcgt

SEQ ID NO: 825 - DNA, 20 bp, Artificial Sequence
  Synthetic construct
agaggaggagacacatgtcg

SEQ ID NO: 826 - DNA, 20 bp, Artificial Sequence
  Synthetic construct
catacaccatgtccatagag

SEQ ID NO: 827 - DNA, 20 bp, Artificial Sequence
  Synthetic construct
gccttctgacaattcagccc

SEQ ID NO: 828 - DNA, 20 bp, Artificial Sequence
  Synthetic construct
gttctgtagacttcacatgc

SEQ ID NO: 829 - DNA, 20 bp, Artificial Sequence
  Synthetic construct
agagcgtgcagataatgaca

SEQ ID NO: 830 - DNA, 20 bp, Artificial Sequence
  Synthetic construct
agctggcagaccacaaactg

SEQ ID NO: 831 - DNA, 20 bp, Artificial Sequence
  Synthetic construct
attcttcataccaggaccag

SEQ ID NO: 832 - DNA, 20 bp, Artificial Sequence
  Synthetic construct
ccaattcaggacccacacga

SEQ ID NO: 833 - DNA, 20 bp, Artificial Sequence
  Synthetic construct
acatcgactgctggacaatg

SEQ ID NO: 834 - DNA, 20 bp, Artificial Sequence
  Synthetic construct
cagtgagtagtgccaaacca

SEQ ID NO: 835 - DNA, 20 bp, Artificial Sequence
  Synthetic construct
gtggcgtactgcacgtgtcg

SEQ ID NO: 836 - DNA, 20 bp, Artificial Sequence
  Synthetic construct
ttcacattatgaccaacacc

SEQ ID NO: 837 - DNA, 30 bp, Artificial Sequence
  Synthetic construct
gcagccggggctggtacttatggagggact

SEQ ID NO: 838 - DNA, 30 bp, Artificial Sequence
  Synthetic construct
gcagcctggggtctccctacccggggggcg

SEQ ID NO: 839 - DNA, 30 bp, Artificial Sequence
  Synthetic construct
actggcggtaccagagcggcaagtgggtgc

SEQ ID NO: 840 - DNA, 30 bp, Artificial Sequence
  Synthetic construct
tgattaaacttggaccacaacaggtggttg

SEQ ID NO: 841 - DNA, 30 bp, Artificial Sequence
  Synthetic construct
ccccaactcacatgtcctcgtcggaggcca

SEQ ID NO: 842 - DNA, 30 bp, Artificial Sequence
  Synthetic construct
cctcacagctctacgaactcgacggggacc

SEQ ID NO: 843 - DNA, 30 bp, Artificial Sequence
  Synthetic construct
agccatagacagcaaccgacgggagggccg

SEQ ID NO: 844 - DNA, 30 bp, Artificial Sequence
  Synthetic construct
agaagctgtggcgtgagatcaccaagggcc

SEQ ID NO: 845 - DNA, 30 bp, Artificial Sequence
  Synthetic construct
ctggaagagagctattcgtctgggtgggat

SEQ ID NO: 846 - DNA, 30 bp, Artificial Sequence
  Synthetic construct
atgaagctgggtcggagaacaacacggcag

SEQ ID NO: 847 - DNA, 30 bp, Artificial Sequence
  Synthetic construct
cagtgccaggacagcagacaagtgtggtgc

SEQ ID NO: 848 - DNA, 30 bp, Artificial Sequence
  Synthetic construct
aaattgcttaccccataacttgtggggaga

SEQ ID NO: 849 - DNA, 30 bp, Artificial Sequence; identical to SEQ ID NO: 585
  Synthetic construct

SEQ ID NO: 850 - DNA, 30 bp, Artificial Sequence; identical to SEQ ID NO: 586
  Synthetic construct

SEQ ID NO: 851 - DNA, 30 bp, Artificial Sequence; identical to SEQ ID NO: 587
  Synthetic construct

SEQ ID NO: 852 - DNA, 30 bp, Artificial Sequence; identical to SEQ ID NO: 588
  Synthetic construct

SEQ ID NO: 853 - DNA, 30 bp, Artificial Sequence; identical to SEQ ID NO: 469
  Synthetic construct

SEQ ID NO: 854 - DNA, 30 bp, Artificial Sequence; identical to SEQ ID NO: 470
  Synthetic construct

SEQ ID NO: 855 - DNA, 30 bp, Artificial Sequence; identical to SEQ ID NO: 471
  Synthetic construct

SEQ ID NO: 856 - DNA, 30 bp, Artificial Sequence; identical to SEQ ID NO: 472
  Synthetic construct

SEQ ID NO: 857 - DNA, 30 bp, Artificial Sequence
  Synthetic construct
cgcgccgacctcgagtccccgcagaggaag

SEQ ID NO: 858 - DNA, 30 bp, Artificial Sequence
  Synthetic construct
tcttcgtggtggcgcggatcctagcggacc

SEQ ID NO: 859 - DNA, 30 bp, Artificial Sequence
  Synthetic construct
gcctcgtgtccatgtcgagccgcgcggtcg

SEQ ID NO: 860 - DNA, 30 bp, Artificial Sequence
  Synthetic construct
gtgtgagttctcaggtgcgccttgaggtgc

SEQ ID NO: 861 - DNA, 30 bp, Artificial Sequence; identical to SEQ ID NO: 429
  Synthetic construct

SEQ ID NO: 862 - DNA, 30 bp, Artificial Sequence; identical to SEQ ID NO: 430
  Synthetic construct

SEQ ID NO: 863 - DNA, 30 bp, Artificial Sequence; identical to SEQ ID NO: 431
  Synthetic construct

SEQ ID NO: 864 - DNA, 30 bp, Artificial Sequence; identical to SEQ ID NO: 432
  Synthetic construct

SEQ ID NO: 865 - DNA, 30 bp, Artificial Sequence
  Synthetic construct
caggagtacctggtcacaaaagtagggtga

SEQ ID NO: 866 - DNA, 30 bp, Artificial Sequence
  Synthetic construct
caagcttcctccagatgtggcatgtggtag

SEQ ID NO: 867 - DNA, 30 bp, Artificial Sequence
  Synthetic construct
gacagcgccgagttccactacacccggccc

SEQ ID NO: 868 - DNA, 30 bp, Artificial Sequence
  Synthetic construct
agttgctgggcaggtattcgtgctcggtga

SEQ ID NO: 869 - DNA, 30 bp, Artificial Sequence; identical to SEQ ID NO: 757
  Synthetic construct

SEQ ID NO: 870 - DNA, 30 bp, Artificial Sequence; identical to SEQ ID NO: 758
  Synthetic construct

SEQ ID NO: 871 - DNA, 30 bp, Artificial Sequence; identical to SEQ ID NO: 759
  Synthetic construct

SEQ ID NO: 872 - DNA, 30 bp, Artificial Sequence; identical to SEQ ID NO: 760
  Synthetic construct

SEQ ID NO: 873 - DNA, 30 bp, Artificial Sequence; identical to SEQ ID NO: 617
  Synthetic construct

SEQ ID NO: 874 - DNA, 30 bp, Artificial Sequence; identical to SEQ ID NO: 618
  Synthetic construct

SEQ ID NO: 875 - DNA, 30 bp, Artificial Sequence; identical to SEQ ID NO: 619
  Synthetic construct

SEQ ID NO: 876 - DNA, 30 bp, Artificial Sequence; identical to SEQ ID NO: 620
  Synthetic construct

SEQ ID NO: 877 - DNA, 30 bp, Artificial Sequence
  Synthetic construct
tgccacaacgataccaataggttgaggaga

SEQ ID NO: 878 - DNA, 30 bp, Artificial Sequence
  Synthetic construct
ccaaagctgaatcactgataacaagggcag

SEQ ID NO: 879 - DNA, 30 bp, Artificial Sequence
  Synthetic construct
tttcctggattcggaataccctagaggaac

SEQ ID NO: 880 - DNA, 30 bp, Artificial Sequence
  Synthetic construct
caaggaagcgggctaattccaagacggtgt

SEQ ID NO: 881 - DNA, 30 bp, Artificial Sequence
  Synthetic construct
cgcccactgcggcccacgaagcgaaggtcg

SEQ ID NO: 882 - DNA, 30 bp, Artificial Sequence
  Synthetic construct
cagaccccaggatgcattatcccggggcca

SEQ ID NO: 883 - DNA, 30 bp, Artificial Sequence
  Synthetic construct
ccctccgtgccgtaccttggattggggtct

SEQ ID NO: 884 - DNA, 30 bp, Artificial Sequence
  Synthetic construct
tggctcggtggtaggtcgccacttgggtgg

SEQ ID NO: 885 - DNA, 30 bp, Artificial Sequence
  Synthetic construct
gatcaaacggtcagcccgcatgtgtggtga

SEQ ID NO: 886 - DNA, 30 bp, Artificial Sequence
  Synthetic construct
caacagaaggaggagcgatacaagcggcat

SEQ ID NO: 887 - DNA, 30 bp, Artificial Sequence
  Synthetic construct
acggatgcgccctaacttctgtgatggctg

SEQ ID NO: 888 - DNA, 30 bp, Artificial Sequence
  Synthetic construct
gaccccaagctagagattcgctatcggcac

SEQ ID NO: 889 - DNA, 30 bp, Artificial Sequence; identical to SEQ ID NO: 409
  Synthetic construct

SEQ ID NO: 890 - DNA, 30 bp, Artificial Sequence; identical to SEQ ID NO: 410
  Synthetic construct

SEQ ID NO: 891 - DNA, 30 bp, Artificial Sequence; identical to SEQ ID NO: 411
  Synthetic construct

SEQ ID NO: 892 - DNA, 30 bp, Artificial Sequence; identical to SEQ ID NO: 412
  Synthetic construct

SEQ ID NO: 893 - DNA, 30 bp, Artificial Sequence
  Synthetic construct
atggaggatgcggatatgactctgtggaca

SEQ ID NO: 894 - DNA, 30 bp, Artificial Sequence
  Synthetic construct
cgtaggacgcgttcaagtaagcgtaggagt

SEQ ID NO: 895 - DNA, 30 bp, Artificial Sequence
  Synthetic construct
aatgggggagcgagtgatgtacgtgggtct

SEQ ID NO: 896 - DNA, 30 bp, Artificial Sequence
  Synthetic construct
ctcttttggacagatctattccagagggga

SEQ ID NO: 897 - DNA, 30 bp, Artificial Sequence; identical to SEQ ID NO: 437
  Synthetic construct

SEQ ID NO: 898 - DNA, 30 bp, Artificial Sequence; identical to SEQ ID NO: 438
  Synthetic construct

SEQ ID NO: 899 - DNA, 30 bp, Artificial Sequence; identical to SEQ ID NO: 439
  Synthetic construct

SEQ ID NO: 900 - DNA, 30 bp, Artificial Sequence; identical to SEQ ID NO: 440
  Synthetic construct

SEQ ID NO: 901 - DNA, 30 bp, Artificial Sequence; identical to SEQ ID NO: 385
  Synthetic construct

SEQ ID NO: 902 - DNA, 30 bp, Artificial Sequence; identical to SEQ ID NO: 386
  Synthetic construct

SEQ ID NO: 903 - DNA, 30 bp, Artificial Sequence; identical to SEQ ID NO: 387
  Synthetic construct

SEQ ID NO: 904 - DNA, 30 bp, Artificial Sequence; identical to SEQ ID NO: 388
  Synthetic construct

SEQ ID NO: 905 - DNA, 30 bp, Artificial Sequence; identical to SEQ ID NO: 389
  Synthetic construct

SEQ ID NO: 906 - DNA, 30 bp, Artificial Sequence; identical to SEQ ID NO: 390
  Synthetic construct

SEQ ID NO: 907 - DNA, 30 bp, Artificial Sequence; identical to SEQ ID NO: 391
  Synthetic construct

SEQ ID NO: 908 - DNA, 30 bp, Artificial Sequence; identical to SEQ ID NO: 392
  Synthetic construct

SEQ ID NO: 909 - DNA, 30 bp, Artificial Sequence; identical to SEQ ID NO: 397
  Synthetic construct

SEQ ID NO: 910 - DNA, 30 bp, Artificial Sequence; identical to SEQ ID NO: 398
  Synthetic construct

SEQ ID NO: 911 - DNA, 30 bp, Artificial Sequence; identical to SEQ ID NO: 399
  Synthetic construct

SEQ ID NO: 912 - DNA, 30 bp, Artificial Sequence; identical to SEQ ID NO: 400
  Synthetic construct

SEQ ID NO: 913 - DNA, 20 bp, Artificial Sequence
  Synthetic construct
gagaacctcggaacatacgg

SEQ ID NO: 914 - DNA, 20 bp, Artificial Sequence
  Synthetic construct
gcagatcgagtcctacccca

SEQ ID NO: 915 - DNA, 20 bp, Artificial Sequence
  Synthetic construct
tcttcttgtctcggcccatg

SEQ ID NO: 916 - DNA, 20 bp, Artificial Sequence
  Synthetic construct
tgagaacgcatctcagcccg

SEQ ID NO: 917 - DNA, 20 bp, Artificial Sequence
  Synthetic construct
acaaaagatccatctcgagt

SEQ ID NO: 918 - DNA, 20 bp, Artificial Sequence
  Synthetic construct
agttgtaatcaaatccacac

SEQ ID NO: 919 - DNA, 20 bp, Artificial Sequence
  Synthetic construct
gatatgatctgtcctgaatg

SEQ ID NO: 920 - DNA, 20 bp, Artificial Sequence
  Synthetic construct
tttgtctaccatgattggca

SEQ ID NO: 921 - DNA, 20 bp, Artificial Sequence
  Synthetic construct
aatgcacttccacaacacaa

SEQ ID NO: 922 - DNA, 20 bp, Artificial Sequence
  Synthetic construct
aatgtgctgcacataaccct

SEQ ID NO: 923 - DNA, 20 bp, Artificial Sequence
  Synthetic construct
ccacgtgcgagtgcacacga

SEQ ID NO: 924 - DNA, 20 bp, Artificial Sequence
  Synthetic construct
gcacattcgaactcatacag

SEQ ID NO: 925 - DNA, 20 bp, Artificial Sequence
  Synthetic construct
aaacttaaatgtgagcatcc

SEQ ID NO: 926 - DNA, 20 bp, Artificial Sequence
  Synthetic construct
acaactggagcatttactgc

SEQ ID NO: 927 - DNA, 20 bp, Artificial Sequence
  Synthetic construct
agaagaagaactcaaacctc

SEQ ID NO: 928 - DNA, 20 bp, Artificial Sequence
  Synthetic construct
ttctttgtagaacttgaagt

SEQ ID NO: 929 - DNA, 20 bp, Artificial Sequence
  Synthetic construct
aagtaggaaatccatagtgt

SEQ ID NO: 930 - DNA, 20 bp, Artificial Sequence
  Synthetic construct
ggcaccaggtagtccaccat

SEQ ID NO: 931 - DNA, 20 bp, Artificial Sequence
  Synthetic construct
tagatggcgtctgataccac

SEQ ID NO: 932 - DNA, 20 bp, Artificial Sequence
  Synthetic construct
ttgtctatgaacatctgtgg

SEQ ID NO: 933 - DNA, 20 bp, Artificial Sequence
  Synthetic construct
gaggcaaaaagaaatcccca

SEQ ID NO: 934 - DNA, 20 bp, Artificial Sequence
  Synthetic construct
gatttctgatgaaaaagacg

SEQ ID NO: 935 - DNA, 20 bp, Artificial Sequence
  Synthetic construct
gctctactggagcgacgagg

SEQ ID NO: 936 - DNA, 20 bp, Artificial Sequence
  Synthetic construct
tcacccaaaaaaatgcacca

SEQ ID NO: 937 - DNA, 20 bp, Artificial Sequence
  Synthetic construct
actacgacctgaatgctgtg

SEQ ID NO: 938 - DNA, 20 bp, Artificial Sequence
  Synthetic construct
gcttccgctacaagtgcgag

SEQ ID NO: 939 - DNA, 20 bp, Artificial Sequence
  Synthetic construct
ggaagatctcatccccaccg

SEQ ID NO: 940 - DNA, 20 bp, Artificial Sequence
  Synthetic construct
tcaatggctacacaggacca

SEQ ID NO: 941 - DNA, 20 bp, Artificial Sequence
  Synthetic construct
gaagactactactggatgac

SEQ ID NO: 942 - DNA, 20 bp, Artificial Sequence
  Synthetic construct
gatcacggcggacaccacgg

SEQ ID NO: 943 - DNA, 20 bp, Artificial Sequence
  Synthetic construct
gctgcacggcgtgctcatgg

SEQ ID NO: 944 - DNA, 20 bp, Artificial Sequence
  Synthetic construct
tgaagtgaaaaaggaaccgg

SEQ ID NO: 945 - DNA, 20 bp, Artificial Sequence
  Synthetic construct
aggagttaagacagcgcttg

SEQ ID NO: 946 - DNA, 20 bp, Artificial Sequence
  Synthetic construct
catggtgccagcccagagag

SEQ ID NO: 947 - DNA, 20 bp, Artificial Sequence
  Synthetic construct
cctcccaggggaatgaagtg

SEQ ID NO: 948 - DNA, 20 bp, Artificial Sequence
  Synthetic construct
ctaaagttctgcttctgtcg

SEQ ID NO: 949 - DNA, 20 bp, Artificial Sequence
  Synthetic construct
agcaagtcgtgcgagttctg

SEQ ID NO: 950 - DNA, 20 bp, Artificial Sequence
  Synthetic construct
ccagcagctcgctcacgccg

SEQ ID NO: 951 - DNA, 20 bp, Artificial Sequence
  Synthetic construct
ccgccatggacttctcgcgg

SEQ ID NO: 952 - DNA, 20 bp, Artificial Sequence
  Synthetic construct
tcagggtgagggtcagacgg

SEQ ID NO: 953 - DNA, 20 bp, Artificial Sequence
  Synthetic construct
cttactaatgaagtaatccg

SEQ ID NO: 954 - DNA, 20 bp, Artificial Sequence
  Synthetic construct
gagaaagcagtctttaccca

SEQ ID NO: 955 - DNA, 20 bp, Artificial Sequence
  Synthetic construct
ggtctcggagaatgaccgag

SEQ ID NO: 956 - DNA, 20 bp, Artificial Sequence
  Synthetic construct
tgcatggggaggaccagtcg

SEQ ID NO: 957 - DNA, 20 bp, Artificial Sequence
  Synthetic construct
agcaaaccacctagtccctg

SEQ ID NO: 958 - DNA, 20 bp, Artificial Sequence
  Synthetic construct
cagagctacgaaccctatga

SEQ ID NO: 959 - DNA, 20 bp, Artificial Sequence
  Synthetic construct
tccggatggtgaggtcacat

SEQ ID NO: 960 - DNA, 20 bp, Artificial Sequence
  Synthetic construct
tgtataggcaaattcaagga

SEQ ID NO: 961 - DNA, 20 bp, Artificial Sequence
  Synthetic construct
acactggaacatatcaagac

SEQ ID NO: 962 - DNA, 20 bp, Artificial Sequence
  Synthetic construct
gacaaatgcaatgaaaactg

SEQ ID NO: 963 - DNA, 20 bp, Artificial Sequence
  Synthetic construct
ggacatcgtgtaccgcacca

SEQ ID NO: 964 - DNA, 20 bp, Artificial Sequence
  Synthetic construct
ggccgcccgggaagtcaaca

SEQ ID NO: 965 - DNA, 20 bp, Artificial Sequence
  Synthetic construct
agacgctatccacgtcgtag

SEQ ID NO: 966 - DNA, 20 bp, Artificial Sequence
  Synthetic construct
gcaaatgttacaggtcctgg

SEQ ID NO: 967 - DNA, 20 bp, Artificial Sequence
  Synthetic construct
ggcggggacaagaaggtcat

SEQ ID NO: 968 - DNA, 20 bp, Artificial Sequence
  Synthetic construct
gtcttgcaggaatgacacca

SEQ ID NO: 969 - DNA, 20 bp, Artificial Sequence
  Synthetic construct
accgtcagcacagccaacgt

SEQ ID NO: 970 - DNA, 20 bp, Artificial Sequence
  Synthetic construct
atcatcggacgccccaaagg

SEQ ID NO: 971 - DNA, 20 bp, Artificial Sequence
  Synthetic construct
gagtcgcgggccgacgacaa

SEQ ID NO: 972 - DNA, 20 bp, Artificial Sequence
  Synthetic construct
gccgtagtggccgttctgcg

SEQ ID NO: 973 - DNA, 20 bp, Artificial Sequence
  Synthetic construct
cacggaccctgatagcatga

SEQ ID NO: 974 - DNA, 20 bp, Artificial Sequence
  Synthetic construct
catcgctcaggagatatacg

SEQ ID NO: 975 - DNA, 20 bp, Artificial Sequence
  Synthetic construct
gcagccgaatcgccaaccgc

SEQ ID NO: 976 - DNA, 20 bp, Artificial Sequence
  Synthetic construct
gcttcgcagcctgctaacca

SEQ ID NO: 977 - DNA, 20 bp, Artificial Sequence
  Synthetic construct
aggttggtgactgtgaacgc

SEQ ID NO: 978 - DNA, 20 bp, Artificial Sequence
  Synthetic construct
agttcatcgacaacaagctg

SEQ ID NO: 979 - DNA, 20 bp, Artificial Sequence
  Synthetic construct
gggctgacactagcagacac

SEQ ID NO: 980 - DNA, 20 bp, Artificial Sequence
  Synthetic construct
tctgttgtggggtctgaacg

SEQ ID NO: 981 - DNA, 20 bp, Artificial Sequence
  Synthetic construct
agatattgaccatgagacag

SEQ ID NO: 982 - DNA, 20 bp, Artificial Sequence
  Synthetic construct
ggagaccatcgagaccacag

SEQ ID NO: 983 - DNA, 20 bp, Artificial Sequence
  Synthetic construct
ggtcaccgacgacccgaccc

SEQ ID NO: 984 - DNA, 20 bp, Artificial Sequence
  Synthetic construct
tgaacaaacgctggtcaccg

SEQ ID NO: 985 - DNA, 20 bp, Artificial Sequence
  Synthetic construct
cacaccaagctgaaacagtg

SEQ ID NO: 986 - DNA, 20 bp, Artificial Sequence
  Synthetic construct
catgcgctttcgtcacagtg

SEQ ID NO: 987 - DNA, 20 bp, Artificial Sequence
  Synthetic construct
ggtgctctcgaagtttactg

SEQ ID NO: 988 - DNA, 20 bp, Artificial Sequence
  Synthetic construct
tgactacttacgatccaatg

SEQ ID NO: 989 - DNA, 20 bp, Artificial Sequence
  Synthetic construct
atcacacatagcgacgaagt

SEQ ID NO: 990 - DNA, 20 bp, Artificial Sequence
  Synthetic construct
cagagcatctctagctaacg

SEQ ID NO: 991 - DNA, 20 bp, Artificial Sequence
  Synthetic construct
ctaactctgctacccaagtg

SEQ ID NO: 992 - DNA, 20 bp, Artificial Sequence
  Synthetic construct
taatgttaatccgagaacgg

SEQ ID NO: 993 - DNA, 20 bp, Artificial Sequence
  Synthetic construct
agatccaccaggatggcacg

SEQ ID NO: 994 - DNA, 20 bp, Artificial Sequence
  Synthetic construct
ccccaccggcacctaccacg

SEQ ID NO: 995 - DNA, 20 bp, Artificial Sequence
  Synthetic construct
ctgcattccaggtcagtctg

SEQ ID NO: 996 - DNA, 20 bp, Artificial Sequence
  Synthetic construct
gctgaccacaccaacctacg

SEQ ID NO: 997 - DNA, 20 bp, Artificial Sequence
  Synthetic construct
atcccgaacctgcattctga

SEQ ID NO: 998 - DNA, 20 bp, Artificial Sequence
  Synthetic construct
caccgcttcagtgcaacacg

SEQ ID NO: 999 - DNA, 20 bp, Artificial Sequence
  Synthetic construct
ccaaggaaaaaactaacgag

SEQ ID NO: 1000 - DNA, 20 bp, Artificial Sequence
  Synthetic construct
gcggctcctagaccggcagg

SEQ ID NO: 1001 - DNA, 20 bp, Artificial Sequence
  Synthetic construct
agcgtaagggcatctcccgg

SEQ ID NO: 1002 - DNA, 20 bp, Artificial Sequence
  Synthetic construct
caaactctgaggggtcactc

SEQ ID NO: 1003 - DNA, 20 bp, Artificial Sequence
  Synthetic construct
tagagcagtcactccagccg

SEQ ID NO: 1004 - DNA, 20 bp, Artificial Sequence
  Synthetic construct
tgcggcggtagtatgggaag

SEQ ID NO: 1005 - DNA, 20 bp, Artificial Sequence
  Synthetic construct
agccggtccctttcccgtcg

SEQ ID NO: 1006 - DNA, 20 bp, Artificial Sequence
  Synthetic construct
cctcagttggcaaggtacct

SEQ ID NO: 1007 - DNA, 20 bp, Artificial Sequence
  Synthetic construct
cctctcaatcaaaataaggt

SEQ ID NO: 1008 - DNA, 20 bp, Artificial Sequence
  Synthetic construct
cgaaaatctgggctaagtgc

SEQ ID NO: 1009 - DNA, 20 bp, Artificial Sequence
  Synthetic construct
atgctgggcacgaacgacgg

SEQ ID NO: 1010 - DNA, 20 bp, Artificial Sequence
  Synthetic construct
catggataacaacaaaacgc

SEQ ID NO: 1011 - DNA, 20 bp, Artificial Sequence
  Synthetic construct
gaagctaccccagaaaaagg

SEQ ID NO: 1012 - DNA, 20 bp, Artificial Sequence
  Synthetic construct
ggacattatcaacccggaca

SEQ ID NO: 1013 - DNA, 20 bp, Artificial Sequence
  Synthetic construct
ctgcagaggccaaagcacgg

SEQ ID NO: 1014 - DNA, 20 bp, Artificial Sequence
  Synthetic construct
gatggagtatgagcgccaag

SEQ ID NO: 1015 - DNA, 20 bp, Artificial Sequence
  Synthetic construct
gcaacacatcaatgttggga

SEQ ID NO: 1016 - DNA, 20 bp, Artificial Sequence
  Synthetic construct
tgtaattgcccctatagtag

SEQ ID NO: 1017 - DNA, 20 bp, Artificial Sequence
  Synthetic construct
atgttcttccgtcaactctg

SEQ ID NO: 1018 - DNA, 20 bp, Artificial Sequence
  Synthetic construct
ctccacagagccatccagcg

SEQ ID NO: 1019 - DNA, 20 bp, Artificial Sequence
  Synthetic construct
ctctcctcggatgaacaagg

SEQ ID NO: 1020 - DNA, 20 bp, Artificial Sequence
  Synthetic construct
gatcggcaggagttcccatg

SEQ ID NO: 1021 - DNA, 20 bp, Artificial Sequence
  Synthetic construct
aggtaccctccgacccacca

SEQ ID NO: 1022 - DNA, 20 bp, Artificial Sequence
  Synthetic construct
cagggagtgtgtgaactgtg

SEQ ID NO: 1023 - DNA, 20 bp, Artificial Sequence
  Synthetic construct
ggagctgtactcgggcacgt

SEQ ID NO: 1024 - DNA, 20 bp, Artificial Sequence
  Synthetic construct
tccaagacgtccatccacca

SEQ ID NO: 1025 - DNA, 20 bp, Artificial Sequence
  Synthetic construct
acctgatcccaaaacatgga

SEQ ID NO: 1026 - DNA, 20 bp, Artificial Sequence
  Synthetic construct
cagcattcggtagaccctga

SEQ ID NO: 1027 - DNA, 20 bp, Artificial Sequence
  Synthetic construct
ggatgcatgcggctagacat

SEQ ID NO: 1028 - DNA, 20 bp, Artificial Sequence
  Synthetic construct
tacctgcataggaagacacg

SEQ ID NO: 1029 - DNA, 20 bp, Artificial Sequence
  Synthetic construct
acattggaagaaagaacacg

SEQ ID NO: 1030 - DNA, 20 bp, Artificial Sequence
  Synthetic construct
atgtaaagttctgccccgtg

SEQ ID NO: 1031 - DNA, 20 bp, Artificial Sequence
  Synthetic construct
gcagggcgagaggagaaact

SEQ ID NO: 1032 - DNA, 20 bp, Artificial Sequence
  Synthetic construct
gccgcagccctcatctcacg

SEQ ID NO: 1033 - DNA, 20 bp, Artificial Sequence
  Synthetic construct
aatgcttcacccatacaaca

SEQ ID NO: 1034 - DNA, 20 bp, Artificial Sequence
  Synthetic construct
cagaccagacagtgttacca

SEQ ID NO: 1035 - DNA, 20 bp, Artificial Sequence
  Synthetic construct
gaaggacaaaagctttgaag

SEQ ID NO: 1036 - DNA, 20 bp, Artificial Sequence
  Synthetic construct
ggttacttgtacacagctga

SEQ ID NO: 1037 - DNA, 20 bp, Artificial Sequence
  Synthetic construct
aacagtgaaactctgttgag

SEQ ID NO: 1038 - DNA, 20 bp, Artificial Sequence
  Synthetic construct
gggaaacgtagccatggcga

SEQ ID NO: 1039 - DNA, 20 bp, Artificial Sequence
  Synthetic construct
ggttcatctaagaacaagag

SEQ ID NO: 1040 - DNA, 20 bp, Artificial Sequence
  Synthetic construct
tgctctgaacccgatgcaga

SEQ ID NO: 1041 - DNA, 20 bp, Artificial Sequence
  Synthetic construct
acctggtgtggacccacgcg

SEQ ID NO: 1042 - DNA, 20 bp, Artificial Sequence
  Synthetic construct
cctcgaactgcaccataggt

SEQ ID NO: 1043 - DNA, 20 bp, Artificial Sequence
  Synthetic construct
gccattgatctgatgtacgg

SEQ ID NO: 1044 - DNA, 20 bp, Artificial Sequence
  Synthetic construct
tggggctctgcatctcacag

SEQ ID NO: 1045 - DNA, 20 bp, Artificial Sequence
  Synthetic construct
aataagatgtgctcgcaaag

SEQ ID NO: 1046 - DNA, 20 bp, Artificial Sequence
  Synthetic construct
caggacttacgagtacagaa

SEQ ID NO: 1047 - DNA, 20 bp, Artificial Sequence
  Synthetic construct
ggcatatattcgactacaca

SEQ ID NO: 1048 - DNA, 20 bp, Artificial Sequence
  Synthetic construct
tatacatcctactgatgaca

SEQ ID NO: 1049 - DNA, 20 bp, Artificial Sequence
  Synthetic construct
acgtcccagcaggcaacaca

SEQ ID NO: 1050 - DNA, 20 bp, Artificial Sequence
  Synthetic construct
ccaatgatgccttatggcac

SEQ ID NO: 1051 - DNA, 20 bp, Artificial Sequence
  Synthetic construct
gataagagagccacgaacca

SEQ ID NO: 1052 - DNA, 20 bp, Artificial Sequence
  Synthetic construct
gtttcgggcacgaagtgcaa

SEQ ID NO: 1053 - DNA, 20 bp, Artificial Sequence
  Synthetic construct
actctccaggcttaacacag

SEQ ID NO: 1054 - DNA, 20 bp, Artificial Sequence
  Synthetic construct
agctctcgaagactgctgtg

SEQ ID NO: 1055 - DNA, 20 bp, Artificial Sequence
  Synthetic construct
gtgtacaaattcctgcacca

SEQ ID NO: 1056 - DNA, 20 bp, Artificial Sequence
  Synthetic construct
tgacgcggaggcgtattcgg

SEQ ID NO: 1057 - DNA, 20 bp, Artificial Sequence
  Synthetic construct
agaggaaagcgagagattgg

SEQ ID NO: 1058 - DNA, 20 bp, Artificial Sequence
  Synthetic construct
ataaaccgcctcgtttccgg

SEQ ID NO: 1059 - DNA, 20 bp, Artificial Sequence
  Synthetic construct
cggggatcaaagttcattgg

SEQ ID NO: 1060 - DNA, 20 bp, Artificial Sequence
  Synthetic construct
ctccgccctatggaccccag

SEQ ID NO: 1061 - DNA, 20 bp, Artificial Sequence
  Synthetic construct
aaagaacaaatggaacgcga

SEQ ID NO: 1062 - DNA, 20 bp, Artificial Sequence
  Synthetic construct
cacctagtaagtcgtttagg

SEQ ID NO: 1063 - DNA, 20 bp, Artificial Sequence
  Synthetic construct
catgccagttcacagcagtg

SEQ ID NO: 1064 - DNA, 20 bp, Artificial Sequence
  Synthetic construct
cattgcctcaggaacaaagg

SEQ ID NO: 1065 - DNA, 20 bp, Artificial Sequence
  Synthetic construct
cagccaggacaacaatgcga

SEQ ID NO: 1066 - DNA, 20 bp, Artificial Sequence
  Synthetic construct
gtggccttaatgttctcctg

SEQ ID NO: 1067 - DNA, 20 bp, Artificial Sequence
  Synthetic construct
gttcattgtacaatatatgg

SEQ ID NO: 1068 - DNA, 20 bp, Artificial Sequence
  Synthetic construct
taagaggtcagaccgtcgtg

SEQ ID NO: 1069 - DNA, 20 bp, Artificial Sequence
  Synthetic construct
agatggaataactatatagc

SEQ ID NO: 1070 - DNA, 20 bp, Artificial Sequence
  Synthetic construct
cagaaccccagcgaagaaga

SEQ ID NO: 1071 - DNA, 20 bp, Artificial Sequence
  Synthetic construct
tcagcctcatgtccatccag

SEQ ID NO: 1072 - DNA, 20 bp, Artificial Sequence
  Synthetic construct
tgaatctcataacctaagag

SEQ ID NO: 1073 - DNA, 20 bp, Artificial Sequence
  Synthetic construct
aattgcacgtcaaactgccg

SEQ ID NO: 1074 - DNA, 20 bp, Artificial Sequence
  Synthetic construct
agttgatgccaactcagtgg

SEQ ID NO: 1075 - DNA, 20 bp, Artificial Sequence
  Synthetic construct
atccagaaacaaaaccagcg

SEQ ID NO: 1076 - DNA, 20 bp, Artificial Sequence
  Synthetic construct
gaagtcactctcatgcaatg

SEQ ID NO: 1077 - DNA, 20 bp, Artificial Sequence
  Synthetic construct
aaagttctggataacaggat

SEQ ID NO: 1078 - DNA, 20 bp, Artificial Sequence
  Synthetic construct
cgcgcggcgatcggacacga

SEQ ID NO: 1079 - DNA, 20 bp, Artificial Sequence
  Synthetic construct
gggttatgcagtgtctgtcg

SEQ ID NO: 1080 - DNA, 20 bp, Artificial Sequence
  Synthetic construct
tctgtctgaagtccccgtac

SEQ ID NO: 1081 - DNA, 20 bp, Artificial Sequence
  Synthetic construct
aggggacacaccaccaccag

SEQ ID NO: 1082 - DNA, 20 bp, Artificial Sequence
  Synthetic construct
catacttctccagctccgag

SEQ ID NO: 1083 - DNA, 20 bp, Artificial Sequence
  Synthetic construct
ccggggtctccgccaccggg

SEQ ID NO: 1084 - DNA, 20 bp, Artificial Sequence
  Synthetic construct
cttcagcaaacaggccactg

SEQ ID NO: 1085 - DNA, 20 bp, Artificial Sequence
  Synthetic construct
actgtcactaacctactggt

SEQ ID NO: 1086 - DNA, 20 bp, Artificial Sequence
  Synthetic construct
cccgcccgctgactgcacat

SEQ ID NO: 1087 - DNA, 20 bp, Artificial Sequence
  Synthetic construct
ctctaccgcccggaaaacgt

SEQ ID NO: 1088 - DNA, 20 bp, Artificial Sequence
  Synthetic construct
ttgggccagagtacgatgca

SEQ ID NO: 1089 - DNA, 20 bp, Artificial Sequence
  Synthetic construct
aatcagatgacaatgagtca

SEQ ID NO: 1090 - DNA, 20 bp, Artificial Sequence
  Synthetic construct
caatacaatatgccacaggg

SEQ ID NO: 1091 - DNA, 20 bp, Artificial Sequence
  Synthetic construct
cctaaccatatgcctatgca

SEQ ID NO: 1092 - DNA, 20 bp, Artificial Sequence
  Synthetic construct
ggcatgttgtgagagcgtgg

SEQ ID NO: 1093 - DNA, 20 bp, Artificial Sequence
  Synthetic construct
aaaaggacggcactgagaag

SEQ ID NO: 1094 - DNA, 20 bp, Artificial Sequence
  Synthetic construct
agcgctggtagggagtcagg

SEQ ID NO: 1095 - DNA, 20 bp, Artificial Sequence
  Synthetic construct
ccaacacctaagagacctcg

SEQ ID NO: 1096 - DNA, 20 bp, Artificial Sequence
  Synthetic construct
gctgtcccgggactcaccgg

SEQ ID NO: 1097 - DNA, 20 bp, Artificial Sequence
  Synthetic construct
acaccggcgcgtggggaacg

SEQ ID NO: 1098 - DNA, 20 bp, Artificial Sequence
  Synthetic construct
ggcaggcggcctgtgcagcg

SEQ ID NO: 1099 - DNA, 20 bp, Artificial Sequence
  Synthetic construct
ggggatctcccaacctgccc

SEQ ID NO: 1100 - DNA, 20 bp, Artificial Sequence
  Synthetic construct
tccaggcatcgccgcccggg

SEQ ID NO: 1101 - DNA, 30 bp, Artificial Sequence; identical to SEQ ID NO: 597
  Synthetic construct

SEQ ID NO: 1102 - DNA, 30 bp, Artificial Sequence; identical to SEQ ID NO: 598
  Synthetic construct

SEQ ID NO: 1103 - DNA, 30 bp, Artificial Sequence; identical to SEQ ID NO: 599
  Synthetic construct

SEQ ID NO: 1104 - DNA, 30 bp, Artificial Sequence; identical to SEQ ID NO: 600
  Synthetic construct

SEQ ID NO: 1105 - DNA, 30 bp, Artificial Sequence
  Synthetic construct
agcaacaaaagatccatctcgagttggaga

SEQ ID NO: 1106 - DNA, 30 bp, Artificial Sequence
  Synthetic construct
ccccagttgtaatcaaatccacactggttt

SEQ ID NO: 1107 - DNA, 30 bp, Artificial Sequence
  Synthetic construct
cggtgatatgatctgtcctgaatgtggctt

SEQ ID NO: 1108 - DNA, 30 bp, Artificial Sequence
  Synthetic construct
gagatttgtctaccatgattggcaaggtaa

SEQ ID NO: 1109 - DNA, 30 bp, Artificial Sequence; identical to SEQ ID NO: 433
  Synthetic construct

SEQ ID NO: 1110 - DNA, 30 bp, Artificial Sequence; identical to SEQ ID NO: 434
  Synthetic construct

SEQ ID NO: 1111 - DNA, 30 bp, Artificial Sequence; identical to SEQ ID NO: 435
  Synthetic construct

SEQ ID NO: 1112 - DNA, 30 bp, Artificial Sequence; identical to SEQ ID NO: 436
  Synthetic construct

SEQ ID NO: 1113 - DNA, 30 bp, Artificial Sequence
  Synthetic construct
tgtaaaacttaaatgtgagcatcctggtga

SEQ ID NO: 1114 - DNA, 30 bp, Artificial Sequence
  Synthetic construct
agctacaactggagcatttactgctggatt

SEQ ID NO: 1115 - DNA, 30 bp, Artificial Sequence
  Synthetic construct
gtctagaagaagaactcaaacctctggagg

SEQ ID NO: 1116 - DNA, 30 bp, Artificial Sequence
  Synthetic construct
tgttttctttgtagaacttgaagtaggtgc

SEQ ID NO: 1117 - DNA, 30 bp, Artificial Sequence
  Synthetic construct
ccataagtaggaaatccatagtgtgggaag

SEQ ID NO: 1118 - DNA, 30 bp, Artificial Sequence
  Synthetic construct
tagaggcaccaggtagtccaccatgggatg

SEQ ID NO: 1119 - DNA, 30 bp, Artificial Sequence
  Synthetic construct
gtcatagatggcgtctgataccacgggttc

SEQ ID NO: 1120 - DNA, 30 bp, Artificial Sequence
  Synthetic construct
ttacttgtctatgaacatctgtgggggaaa

SEQ ID NO: 1121 - DNA, 30 bp, Artificial Sequence; identical to SEQ ID NO: 621
  Synthetic construct

SEQ ID NO: 1122 - DNA, 30 bp, Artificial Sequence; identical to SEQ ID NO: 622
  Synthetic construct

SEQ ID NO: 1123 - DNA, 30 bp, Artificial Sequence; identical to SEQ ID NO: 623
  Synthetic construct

SEQ ID NO: 1124 - DNA, 30 bp, Artificial Sequence; identical to SEQ ID NO: 624
  Synthetic construct

SEQ ID NO: 1125 - DNA, 30 bp, Artificial Sequence; identical to SEQ ID NO: 421
  Synthetic construct

SEQ ID NO: 1126 - DNA, 30 bp, Artificial Sequence; identical to SEQ ID NO: 422
  Synthetic construct

SEQ ID NO: 1127 - DNA, 30 bp, Artificial Sequence; identical to SEQ ID NO: 423
  Synthetic construct

SEQ ID NO: 1128 - DNA, 30 bp, Artificial Sequence; identical to SEQ ID NO: 424
  Synthetic construct

SEQ ID NO: 1129 - DNA, 30 bp, Artificial Sequence; identical to SEQ ID NO: 589
  Synthetic construct

SEQ ID NO: 1130 - DNA, 30 bp, Artificial Sequence; identical to SEQ ID NO: 590
  Synthetic construct

SEQ ID NO: 1131 - DNA, 30 bp, Artificial Sequence; identical to SEQ ID NO: 591
  Synthetic construct

SEQ ID NO: 1132 - DNA, 30 bp, Artificial Sequence; identical to SEQ ID NO: 592
  Synthetic construct

SEQ ID NO: 1133 - DNA, 30 bp, Artificial Sequence
  Synthetic construct
aaccaggagttaagacagcgcttggggatg

SEQ ID NO: 1134 - DNA, 30 bp, Artificial Sequence
  Synthetic construct
cgctcatggtgccagcccagagaggggcca

SEQ ID NO: 1135 - DNA, 30 bp, Artificial Sequence
  Synthetic construct
ctttcctcccaggggaatgaagtgaggcca

SEQ ID NO: 1136 - DNA, 30 bp, Artificial Sequence
  Synthetic construct
acccctaaagttctgcttctgtcggggcag

SEQ ID NO: 1137 - DNA, 30 bp, Artificial Sequence; identical to SEQ ID NO: 441
  Synthetic construct

SEQ ID NO: 1138 - DNA, 30 bp, Artificial Sequence; identical to SEQ ID NO: 442
  Synthetic construct

SEQ ID NO: 1139 - DNA, 30 bp, Artificial Sequence; identical to SEQ ID NO: 443
  Synthetic construct

SEQ ID NO: 1140 - DNA, 30 bp, Artificial Sequence; identical to SEQ ID NO: 444
  Synthetic construct

SEQ ID NO: 1141 - DNA, 30 bp, Artificial Sequence; identical to SEQ ID NO: 601
  Synthetic construct

SEQ ID NO: 1142 - DNA, 30 bp, Artificial Sequence; identical to SEQ ID NO: 602
  Synthetic construct

SEQ ID NO: 1143 - DNA, 30 bp, Artificial Sequence; identical to SEQ ID NO: 603
  Synthetic construct

SEQ ID NO: 1144 - DNA, 30 bp, Artificial Sequence; identical to SEQ ID NO: 604
  Synthetic construct

SEQ ID NO: 1145 - DNA, 30 bp, Artificial Sequence
  Synthetic construct
ccagagcaaaccacctagtccctgaggtgc

SEQ ID NO: 1146 - DNA, 30 bp, Artificial Sequence
  Synthetic construct
tccccagagctacgaaccctatgagggtga

SEQ ID NO: 1147 - DNA, 30 bp, Artificial Sequence
  Synthetic construct
tgcgtccggatggtgaggtcacataggtgg

SEQ ID NO: 1148 - DNA, 30 bp, Artificial Sequence
  Synthetic construct
tggctgtataggcaaattcaaggagggcgc

SEQ ID NO: 1149 - DNA, 30 bp, Artificial Sequence; identical to SEQ ID NO: 413
  Synthetic construct

SEQ ID NO: 1150 - DNA, 30 bp, Artificial Sequence; identical to SEQ ID NO: 414
  Synthetic construct

SEQ ID NO: 1151 - DNA, 30 bp, Artificial Sequence; identical to SEQ ID NO: 415
  Synthetic construct

SEQ ID NO: 1152 - DNA, 30 bp, Artificial Sequence; identical to SEQ ID NO: 416
  Synthetic construct

SEQ ID NO: 1153 - DNA, 30 bp, Artificial Sequence
  Synthetic construct
ttatagacgctatccacgtcgtaggggtcc

SEQ ID NO: 1154 - DNA, 30 bp, Artificial Sequence
  Synthetic construct
ggcagcaaatgttacaggtcctggtggtgt

SEQ ID NO: 1155 - DNA, 30 bp, Artificial Sequence
  Synthetic construct
tgccggcggggacaagaaggtcatcggtga

SEQ ID NO: 1156 - DNA, 30 bp, Artificial Sequence
  Synthetic construct
ttctgtcttgcaggaatgacaccaaggaag

SEQ ID NO: 1157 - DNA, 30 bp, Artificial Sequence; identical to SEQ ID NO: 605
  Synthetic construct

SEQ ID NO: 1158 - DNA, 30 bp, Artificial Sequence; identical to SEQ ID NO: 606
  Synthetic construct

SEQ ID NO: 1159 - DNA, 30 bp, Artificial Sequence; identical to SEQ ID NO: 607
  Synthetic construct

SEQ ID NO: 1160 - DNA, 30 bp, Artificial Sequence; identical to SEQ ID NO: 608
  Synthetic construct

SEQ ID NO: 1161 - DNA, 30 bp, Artificial Sequence
  Synthetic construct
acgacacggaccctgatagcatgaaggatt

SEQ ID NO: 1162 - DNA, 30 bp, Artificial Sequence
  Synthetic construct
aggccatcgctcaggagatatacgcggacc

SEQ ID NO: 1163 - DNA, 30 bp, Artificial Sequence
  Synthetic construct
aacagcagccgaatcgccaaccgccggtga

SEQ ID NO: 1164 - DNA, 30 bp, Artificial Sequence
  Synthetic construct
aggagcttcgcagcctgctaaccacggtga

SEQ ID NO: 1165 - DNA, 30 bp, Artificial Sequence
  Synthetic construct
cggcaggttggtgactgtgaacgccggctt

SEQ ID NO: 1166 - DNA, 30 bp, Artificial Sequence
  Synthetic construct
atggagttcatcgacaacaagctgcggcgc

SEQ ID NO: 1167 - DNA, 30 bp, Artificial Sequence
  Synthetic construct
actggggctgacactagcagacactggtgc

SEQ ID NO: 1168 - DNA, 30 bp, Artificial Sequence
  Synthetic construct
ctggtctgttgtggggtctgaacggggtgg

SEQ ID NO: 1169 - DNA, 30 bp, Artificial Sequence
  Synthetic construct
aaaaagatattgaccatgagacagtggttg

SEQ ID NO: 1170 - DNA, 30 bp, Artificial Sequence
  Synthetic construct
cggtggagaccatcgagaccacagtggtgg

SEQ ID NO: 1171 - DNA, 30 bp, Artificial Sequence
  Synthetic construct
cgctggtcaccgacgacccgacccaggtgc

SEQ ID NO: 1172 - DNA, 30 bp, Artificial Sequence
  Synthetic construct
acattgaacaaacgctggtcaccgtggcgg

SEQ ID NO: 1173 - DNA, 30 bp, Artificial Sequence; identical to SEQ ID NO: 577
  Synthetic construct

SEQ ID NO: 1174 - DNA, 30 bp, Artificial Sequence; identical to SEQ ID NO: 578
  Synthetic construct

SEQ ID NO: 1175 - DNA, 30 bp, Artificial Sequence; identical to SEQ ID NO: 579
  Synthetic construct

SEQ ID NO: 1176 - DNA, 30 bp, Artificial Sequence; identical to SEQ ID NO: 580
  Synthetic construct

SEQ ID NO: 1177 - DNA, 30 bp, Artificial Sequence; identical to SEQ ID NO: 425
  Synthetic construct

SEQ ID NO: 1178 - DNA, 30 bp, Artificial Sequence; identical to SEQ ID NO: 426
  Synthetic construct

SEQ ID NO: 1179 - DNA, 30 bp, Artificial Sequence; identical to SEQ ID NO: 427
  Synthetic construct

SEQ ID NO: 1180 - DNA, 30 bp, Artificial Sequence; identical to SEQ ID NO: 428
  Synthetic construct

SEQ ID NO: 1181 - DNA, 30 bp, Artificial Sequence
  Synthetic construct
ttctagatccaccaggatggcacgaggaac

SEQ ID NO: 1182 - DNA, 30 bp, Artificial Sequence
  Synthetic construct
tcgaccccaccggcacctaccacggggaca

SEQ ID NO: 1183 - DNA, 30 bp, Artificial Sequence
  Synthetic construct
ctgactgcattccaggtcagtctggggcag

SEQ ID NO: 1184 - DNA, 30 bp, Artificial Sequence
  Synthetic construct
tgaagctgaccacaccaacctacggggatc

SEQ ID NO: 1185 - DNA, 30 bp, Artificial Sequence; identical to SEQ ID NO: 461
  Synthetic construct

SEQ ID NO: 1186 - DNA, 30 bp, Artificial Sequence; identical to SEQ ID NO: 462
  Synthetic construct

SEQ ID NO: 1187 - DNA, 30 bp, Artificial Sequence; identical to SEQ ID NO: 463
  Synthetic construct

SEQ ID NO: 1188 - DNA, 30 bp, Artificial Sequence; identical to SEQ ID NO: 464
  Synthetic construct

SEQ ID NO: 1189 - DNA, 30 bp, Artificial Sequence
  Synthetic construct
gcagagcgtaagggcatctcccgggggcgg

SEQ ID NO: 1190 - DNA, 30 bp, Artificial Sequence
  Synthetic construct
gtgccaaactctgaggggtcactcgggccg

SEQ ID NO: 1191 - DNA, 30 bp, Artificial Sequence
  Synthetic construct
ttcctagagcagtcactccagccggggctg

SEQ ID NO: 1192 - DNA, 30 bp, Artificial Sequence
  Synthetic construct
aacttgcggcggtagtatgggaagcggcca

SEQ ID NO: 1193 - DNA, 30 bp, Artificial Sequence; identical to SEQ ID NO: 593
  Synthetic construct

SEQ ID NO: 1194 - DNA, 30 bp, Artificial Sequence; identical to SEQ ID NO: 594
  Synthetic construct

SEQ ID NO: 1195 - DNA, 30 bp, Artificial Sequence; identical to SEQ ID NO: 595
  Synthetic construct

SEQ ID NO: 1196 - DNA, 30 bp, Artificial Sequence; identical to SEQ ID NO: 596
  Synthetic construct

SEQ ID NO: 1197 - DNA, 30 bp, Artificial Sequence
  Synthetic construct
tttgatgctgggcacgaacgacggcggaag

SEQ ID NO: 1198 - DNA, 30 bp, Artificial Sequence
  Synthetic construct
cggtcatggataacaacaaaacgcaggtca

SEQ ID NO: 1199 - DNA, 30 bp, Artificial Sequence
  Synthetic construct
aaaagaagctaccccagaaaaaggaggctg

SEQ ID NO: 1200 - DNA, 30 bp, Artificial Sequence
  Synthetic construct
agaaggacattatcaacccggacaaggtag

SEQ ID NO: 1201 - DNA, 30 bp, Artificial Sequence
  Synthetic construct
gcagctgcagaggccaaagcacggcggatc

SEQ ID NO: 1202 - DNA, 30 bp, Artificial Sequence
  Synthetic construct
ctcagatggagtatgagcgccaagtggctt

SEQ ID NO: 1203 - DNA, 30 bp, Artificial Sequence
  Synthetic construct
cacagcaacacatcaatgttgggagggatg

SEQ ID NO: 1204 - DNA, 30 bp, Artificial Sequence
  Synthetic construct
ttactgtaattgcccctatagtagtggagc

SEQ ID NO: 1205 - DNA, 30 bp, Artificial Sequence
  Synthetic construct
ctccatgttcttccgtcaactctgaggcct

SEQ ID NO: 1206 - DNA, 30 bp, Artificial Sequence
  Synthetic construct
gtctctccacagagccatccagcgaggtga

SEQ ID NO: 1207 - DNA, 30 bp, Artificial Sequence
  Synthetic construct
ccatctctcctcggatgaacaagggggagc

SEQ ID NO: 1208 - DNA, 30 bp, Artificial Sequence
  Synthetic construct
ggaagatcggcaggagttcccatgggggct

SEQ ID NO: 1209 - DNA, 30 bp, Artificial Sequence; identical to SEQ ID NO: 697
  Synthetic construct

SEQ ID NO: 1210 - DNA, 30 bp, Artificial Sequence; identical to SEQ ID NO: 698
  Synthetic construct

SEQ ID NO: 1211 - DNA, 30 bp, Artificial Sequence; identical to SEQ ID NO: 699
  Synthetic construct

SEQ ID NO: 1212 - DNA, 30 bp, Artificial Sequence; identical to SEQ ID NO: 700
  Synthetic construct

SEQ ID NO: 1213 - DNA, 30 bp, Artificial Sequence
  Synthetic construct
ataaacctgatcccaaaacatggaaggcga

SEQ ID NO: 1214 - DNA, 30 bp, Artificial Sequence
  Synthetic construct
ggggcagcattcggtagaccctgaaggcat

SEQ ID NO: 1215 - DNA, 30 bp, Artificial Sequence
  Synthetic construct
ccctggatgcatgcggctagacatgggtgg

SEQ ID NO: 1216 - DNA, 30 bp, Artificial Sequence
  Synthetic construct
cgcttacctgcataggaagacacgggggag

SEQ ID NO: 1217 - DNA, 30 bp, Artificial Sequence
  Synthetic construct
acggacattggaagaaagaacacgcgggtg

SEQ ID NO: 1218 - DNA, 30 bp, Artificial Sequence
  Synthetic construct
tcggatgtaaagttctgccccgtgaggatc

SEQ ID NO: 1219 - DNA, 30 bp, Artificial Sequence
  Synthetic construct
gcgagcagggcgagaggagaaactcggctc

SEQ ID NO: 1220 - DNA, 30 bp, Artificial Sequence
  Synthetic construct
cctcgccgcagccctcatctcacgtggcac

SEQ ID NO: 1221 - DNA, 30 bp, Artificial Sequence
  Synthetic construct
aatcaatgcttcacccatacaacaaggtgg

SEQ ID NO: 1222 - DNA, 30 bp, Artificial Sequence
  Synthetic construct
ccaacagaccagacagtgttaccagggagg

SEQ ID NO: 1223 - DNA, 30 bp, Artificial Sequence
  Synthetic construct
ctgagaaggacaaaagctttgaaggggggg

SEQ ID NO: 1224 - DNA, 30 bp, Artificial Sequence
  Synthetic construct
acagggttacttgtacacagctgagggtgc

SEQ ID NO: 1225 - DNA, 30 bp, Artificial Sequence
  Synthetic construct
aatgaacagtgaaactctgttgagtggaga

SEQ ID NO: 1226 - DNA, 30 bp, Artificial Sequence
  Synthetic construct
agcagggaaacgtagccatggcgacggtgg

SEQ ID NO: 1227 - DNA, 30 bp, Artificial Sequence
  Synthetic construct
tgatggttcatctaagaacaagaggggcgt

SEQ ID NO: 1228 - DNA, 30 bp, Artificial Sequence
  Synthetic construct
aaactgctctgaacccgatgcagaaggagt

SEQ ID NO: 1229 - DNA, 30 bp, Artificial Sequence
  Synthetic construct
ctgcacctggtgtggacccacgcgaggcac

SEQ ID NO: 1230 - DNA, 30 bp, Artificial Sequence
  Synthetic construct
atcacctcgaactgcaccataggtgggtgg

SEQ ID NO: 1231 - DNA, 30 bp, Artificial Sequence
  Synthetic construct
ctcagccattgatctgatgtacggaggcat

SEQ ID NO: 1232 - DNA, 30 bp, Artificial Sequence
  Synthetic construct
gagctggggctctgcatctcacagcggtgc

SEQ ID NO: 1233 - DNA, 30 bp, Artificial Sequence
  Synthetic construct
gacgaataagatgtgctcgcaaagaggcac

SEQ ID NO: 1234 - DNA, 30 bp, Artificial Sequence
  Synthetic construct
cacccaggacttacgagtacagaatggagg

SEQ ID NO: 1235 - DNA, 30 bp, Artificial Sequence
  Synthetic construct
aaggggcatatattcgactacacaagggaa

SEQ ID NO: 1236 - DNA, 30 bp, Artificial Sequence
  Synthetic construct
cagctatacatcctactgatgacagggcag

SEQ ID NO: 1237 - DNA, 30 bp, Artificial Sequence
  Synthetic construct
gtcaacgtcccagcaggcaacacagggaac

SEQ ID NO: 1238 - DNA, 30 bp, Artificial Sequence
  Synthetic construct
tagtccaatgatgccttatggcactggact

SEQ ID NO: 1239 - DNA, 30 bp, Artificial Sequence
  Synthetic construct
tgaggataagagagccacgaaccacggcac

SEQ ID NO: 1240 - DNA, 30 bp, Artificial Sequence
  Synthetic construct
cggcgtttcgggcacgaagtgcaatggtct

SEQ ID NO: 1241 - DNA, 30 bp, Artificial Sequence
  Synthetic construct
acttactctccaggcttaacacagcggggc

SEQ ID NO: 1242 - DNA, 30 bp, Artificial Sequence
  Synthetic construct
caggagctctcgaagactgctgtggggtcg

SEQ ID NO: 1243 - DNA, 30 bp, Artificial Sequence
  Synthetic construct
ccaggtgtacaaattcctgcaccatggtgc

SEQ ID NO: 1244 - DNA, 30 bp, Artificial Sequence
  Synthetic construct
ttcgtgacgcggaggcgtattcggaggacg

SEQ ID NO: 1245 - DNA, 30 bp, Artificial Sequence
  Synthetic construct
ctccagaggaaagcgagagattgggggccc

SEQ ID NO: 1246 - DNA, 30 bp, Artificial Sequence
  Synthetic construct
caggataaaccgcctcgtttccggaggctg

SEQ ID NO: 1247 - DNA, 30 bp, Artificial Sequence
  Synthetic construct
ccatcggggatcaaagttcattgggggcat

SEQ ID NO: 1248 - DNA, 30 bp, Artificial Sequence
  Synthetic construct
ttccctccgccctatggaccccaggggcct

SEQ ID NO: 1249 - DNA, 30 bp, Artificial Sequence
  Synthetic construct
aaaaaaagaacaaatggaacgcgatggttg

SEQ ID NO: 1250 - DNA, 30 bp, Artificial Sequence
  Synthetic construct
tactcacctagtaagtcgtttaggtggagg

SEQ ID NO: 1251 - DNA, 30 bp, Artificial Sequence
  Synthetic construct
ttttcatgccagttcacagcagtggggagc

SEQ ID NO: 1252 - DNA, 30 bp, Artificial Sequence
  Synthetic construct
tatgcattgcctcaggaacaaaggtggctc

SEQ ID NO: 1253 - DNA, 30 bp, Artificial Sequence; identical to SEQ ID NO: 701
  Synthetic construct

SEQ ID NO: 1254 - DNA, 30 bp, Artificial Sequence; identical to SEQ ID NO: 702
  Synthetic construct

SEQ ID NO: 1255 - DNA, 30 bp, Artificial Sequence; identical to SEQ ID NO: 703
  Synthetic construct

SEQ ID NO: 1256 - DNA, 30 bp, Artificial Sequence; identical to SEQ ID NO: 704
  Synthetic construct

SEQ ID NO: 1257 - DNA, 30 bp, Artificial Sequence
  Synthetic construct
tattagatggaataactatatagctggccg

SEQ ID NO: 1258 - DNA, 30 bp, Artificial Sequence
  Synthetic construct
tgctcagaaccccagcgaagaagagggtga

SEQ ID NO: 1259 - DNA, 30 bp, Artificial Sequence
  Synthetic construct
ttcatcagcctcatgtccatccagaggtat

SEQ ID NO: 1260 - DNA, 30 bp, Artificial Sequence
  Synthetic construct
ttgatgaatctcataacctaagagaggaat

SEQ ID NO: 1261 - DNA, 30 bp, Artificial Sequence
  Synthetic construct
gtgaaattgcacgtcaaactgccgaggaat

SEQ ID NO: 1262 - DNA, 30 bp, Artificial Sequence
  Synthetic construct
gccaagttgatgccaactcagtggaggacc

SEQ ID NO: 1263 - DNA, 30 bp, Artificial Sequence
  Synthetic construct
ccaaatccagaaacaaaaccagcgcggcct

SEQ ID NO: 1264 - DNA, 30 bp, Artificial Sequence
  Synthetic construct
ctgagaagtcactctcatgcaatggggtat

SEQ ID NO: 1265 - DNA, 30 bp, Artificial Sequence; identical to SEQ ID NO: 549
  Synthetic construct

SEQ ID NO: 1266 - DNA, 30 bp, Artificial Sequence; identical to SEQ ID NO: 550
  Synthetic construct

SEQ ID NO: 1267 - DNA, 30 bp, Artificial Sequence; identical to SEQ ID NO: 551
  Synthetic construct

SEQ ID NO: 1268 - DNA, 30 bp, Artificial Sequence; identical to SEQ ID NO: 552
  Synthetic construct

SEQ ID NO: 1269 - DNA, 30 bp, Artificial Sequence
  Synthetic construct
tgtcaggggacacaccaccaccagaggctg

SEQ ID NO: 1270 - DNA, 30 bp, Artificial Sequence
  Synthetic construct
tgctcatacttctccagctccgagtggtat

SEQ ID NO: 1271 - DNA, 30 bp, Artificial Sequence
  Synthetic construct
cccaccggggtctccgccaccgggaggctc

SEQ ID NO: 1272 - DNA, 30 bp, Artificial Sequence
  Synthetic construct
gtaacttcagcaaacaggccactgaggtcc

SEQ ID NO: 1273 - DNA, 30 bp, Artificial Sequence
  Synthetic construct
tgccactgtcactaacctactggtgggcac

SEQ ID NO: 1274 - DNA, 30 bp, Artificial Sequence
  Synthetic construct
cgtgcccgcccgctgactgcacataggtga

SEQ ID NO: 1275 - DNA, 30 bp, Artificial Sequence
  Synthetic construct
ttgcctctaccgcccggaaaacgtcggacc

SEQ ID NO: 1276 - DNA, 30 bp, Artificial Sequence
  Synthetic construct
ggctttgggccagagtacgatgcagggcca

SEQ ID NO: 1277 - DNA, 30 bp, Artificial Sequence; identical to SEQ ID NO: 725
  Synthetic construct

SEQ ID NO: 1278 - DNA, 30 bp, Artificial Sequence; identical to SEQ ID NO: 726
  Synthetic construct

SEQ ID NO: 1279 - DNA, 30 bp, Artificial Sequence; identical to SEQ ID NO: 727
  Synthetic construct

SEQ ID NO: 1280 - DNA, 30 bp, Artificial Sequence; identical to SEQ ID NO: 728
  Synthetic construct

SEQ ID NO: 1281 - DNA, 30 bp, Artificial Sequence; identical to SEQ ID NO: 557
  Synthetic construct

SEQ ID NO: 1282 - DNA, 30 bp, Artificial Sequence; identical to SEQ ID NO: 558
  Synthetic construct

SEQ ID NO: 1283 - DNA, 30 bp, Artificial Sequence; identical to SEQ ID NO: 559
  Synthetic construct

SEQ ID NO: 1284 - DNA, 30 bp, Artificial Sequence; identical to SEQ ID NO: 560
  Synthetic construct

SEQ ID NO: 1285 - DNA, 30 bp, Artificial Sequence
  Synthetic construct
gcccacaccggcgcgtggggaacggggctt

SEQ ID NO: 1286 - DNA, 30 bp, Artificial Sequence
  Synthetic construct
cgcaggcaggcggcctgtgcagcgcggccc

SEQ ID NO: 1287 - DNA, 30 bp, Artificial Sequence
  Synthetic construct
cagaggggatctcccaacctgccccggcgc

SEQ ID NO: 1288 - DNA, 30 bp, Artificial Sequence
  Synthetic construct
gctttccaggcatcgccgcccgggaggagc

SEQ ID NO: 1289 - DNA, 20 bp, Artificial Sequence
  Synthetic construct
cgatccaaatttgaacgccg

SEQ ID NO: 1290 - DNA, 20 bp, Artificial Sequence
  Synthetic construct
gagcaaactgcgttatacag

SEQ ID NO: 1291 - DNA, 20 bp, Artificial Sequence
  Synthetic construct
ttaccccagaaccagacgga

SEQ ID NO: 1292 - DNA, 20 bp, Artificial Sequence
  Synthetic construct
tttgtgcagttatgccagca

SEQ ID NO: 1293 - DNA, 20 bp, Artificial Sequence
  Synthetic construct
agcattatccaaagagtccg

SEQ ID NO: 1294 - DNA, 20 bp, Artificial Sequence
  Synthetic construct
ggaaacttgctgaacacccg

SEQ ID NO: 1295 - DNA, 20 bp, Artificial Sequence
  Synthetic construct
tccaaatggtaacgttcatg

SEQ ID NO: 1296 - DNA, 20 bp, Artificial Sequence
  Synthetic construct
tgtggattacttatataaca

SEQ ID NO: 1297 - DNA, 20 bp, Artificial Sequence
  Synthetic construct
ccagtcgacacccatcattg

SEQ ID NO: 1298 - DNA, 20 bp, Artificial Sequence
  Synthetic construct
ccccagtaaacgctccacag

SEQ ID NO: 1299 - DNA, 20 bp, Artificial Sequence
  Synthetic construct
gaacgtcaccttagaatccg

SEQ ID NO: 1300 - DNA, 20 bp, Artificial Sequence
  Synthetic construct
tctttgtctgccacaaacgt

SEQ ID NO: 1301 - DNA, 20 bp, Artificial Sequence
  Synthetic construct
ccattgttcaatatcgtccg

SEQ ID NO: 1302 - DNA, 20 bp, Artificial Sequence
  Synthetic construct
gagcgctgctcagatagcga

SEQ ID NO: 1303 - DNA, 20 bp, Artificial Sequence
  Synthetic construct
gatccactcacagtttccat

SEQ ID NO: 1304 - DNA, 20 bp, Artificial Sequence
  Synthetic construct
ggtgccctatgagccgcctg

SEQ ID NO: 1305 - DNA, 20 bp, Artificial Sequence
  Synthetic construct
cacggaccctgatagcatga

SEQ ID NO: 1306 - DNA, 20 bp, Artificial Sequence
  Synthetic construct
catcgctcaggagatatacg

SEQ ID NO: 1307 - DNA, 20 bp, Artificial Sequence
  Synthetic construct
gcagccgaatcgccaaccgc

SEQ ID NO: 1308 - DNA, 20 bp, Artificial Sequence
  Synthetic construct
gcttcgcagcctgctaacca

SEQ ID NO: 1309 - DNA, 20 bp, Artificial Sequence
  Synthetic construct
accggcagcgtcaaacaccc

SEQ ID NO: 1310 - DNA, 20 bp, Artificial Sequence
  Synthetic construct
atgaccagaaaaacataaga

SEQ ID NO: 1311 - DNA, 20 bp, Artificial Sequence
  Synthetic construct
ccttcatggagaaatgccgt

SEQ ID NO: 1312 - DNA, 20 bp, Artificial Sequence
  Synthetic construct
ggtgcagagaaaccggcatg

SEQ ID NO: 1313 - DNA, 20 bp, Artificial Sequence
  Synthetic construct
atgatgtttgatgaccgtcg

SEQ ID NO: 1314 - DNA, 20 bp, Artificial Sequence
  Synthetic construct
ctgttgggacataccgctcg

SEQ ID NO: 1315 - DNA, 20 bp, Artificial Sequence
  Synthetic construct
gatgatatgagccctcgtcg

SEQ ID NO: 1316 - DNA, 20 bp, Artificial Sequence
  Synthetic construct
taaaatcaaagaacttcgag

SEQ ID NO: 1317 - DNA, 20 bp, Artificial Sequence
  Synthetic construct
actcgactacggcgtcaccg

SEQ ID NO: 1318 - DNA, 20 bp, Artificial Sequence
  Synthetic construct
cccactccatagaatctccg

SEQ ID NO: 1319 - DNA, 20 bp, Artificial Sequence
  Synthetic construct
ctgcaactgaaacgcaagcg

SEQ ID NO: 1320 - DNA, 20 bp, Artificial Sequence
  Synthetic construct
gggaccagccaagatcgagg

SEQ ID NO: 1321 - DNA, 20 bp, Artificial Sequence
  Synthetic construct
aggatgcggatatgactctg

SEQ ID NO: 1322 - DNA, 20 bp, Artificial Sequence
  Synthetic construct
ggacgcgttcaagtaagcgt

SEQ ID NO: 1323 - DNA, 20 bp, Artificial Sequence
  Synthetic construct
ggggagcgagtgatgtacgt

SEQ ID NO: 1324 - DNA, 20 bp, Artificial Sequence
  Synthetic construct
tttggacagatctattccag

SEQ ID NO: 1325 - DNA, 20 bp, Artificial Sequence
  Synthetic construct
agagtgcatcgacccctcgg

SEQ ID NO: 1326 - DNA, 20 bp, Artificial Sequence
  Synthetic construct
ctgcggggaggactccgtcg

SEQ ID NO: 1327 - DNA, 20 bp, Artificial Sequence
  Synthetic construct
cttcggggagacaacgacgg

SEQ ID NO: 1328 - DNA, 20 bp, Artificial Sequence
  Synthetic construct
gctgcaccgagtcgtagtcg

SEQ ID NO: 1329 - DNA, 20 bp, Artificial Sequence
  Synthetic construct
gagaacctcggaacatacgg

SEQ ID NO: 1330 - DNA, 20 bp, Artificial Sequence
  Synthetic construct
gcagatcgagtcctacccca

SEQ ID NO: 1331 - DNA, 20 bp, Artificial Sequence
  Synthetic construct
tcttcttgtctcggcccatg

SEQ ID NO: 1332 - DNA, 20 bp, Artificial Sequence
  Synthetic construct
tgagaacgcatctcagcccg

SEQ ID NO: 1333 - DNA, 20 bp, Artificial Sequence
  Synthetic construct
ccgacctcgagtccccgcag

SEQ ID NO: 1334 - DNA, 20 bp, Artificial Sequence
  Synthetic construct
cgtggtggcgcggatcctag

SEQ ID NO: 1335 - DNA, 20 bp, Artificial Sequence
  Synthetic construct
cgtgtccatgtcgagccgcg

SEQ ID NO: 1336 - DNA, 20 bp, Artificial Sequence
  Synthetic construct
gagttctcaggtgcgccttg

SEQ ID NO: 1337 - DNA, 20 bp, Artificial Sequence
  Synthetic construct
gaactccctgccagatatcg

SEQ ID NO: 1338 - DNA, 20 bp, Artificial Sequence
  Synthetic construct
tctaggccgatacaaagcag

SEQ ID NO: 1339 - DNA, 20 bp, Artificial Sequence
  Synthetic construct
tctccctcgacagtcatgtg

SEQ ID NO: 1340 - DNA, 20 bp, Artificial Sequence
  Synthetic construct
ttaattccaaccaaatcccg

SEQ ID NO: 1341 - DNA, 20 bp, Artificial Sequence
  Synthetic construct
acaggttgccccacgcgttg

SEQ ID NO: 1342 - DNA, 20 bp, Artificial Sequence
  Synthetic construct
ggagtttagccagtccaact

SEQ ID NO: 1343 - DNA, 20 bp, Artificial Sequence
  Synthetic construct
ggtggcgcaaacgagtagca

SEQ ID NO: 1344 - DNA, 20 bp, Artificial Sequence
  Synthetic construct
tagcatttgagctagttcga

SEQ ID NO: 1345 - DNA, 20 bp, Artificial Sequence
  Synthetic construct
acctgatcccaaaacatgga

SEQ ID NO: 1346 - DNA, 20 bp, Artificial Sequence
  Synthetic construct
cagcattcggtagaccctga

SEQ ID NO: 1347 - DNA, 20 bp, Artificial Sequence
  Synthetic construct
ggatgcatgcggctagacat

SEQ ID NO: 1348 - DNA, 20 bp, Artificial Sequence
  Synthetic construct
tacctgcataggaagacacg

SEQ ID NO: 1349 - DNA, 20 bp, Artificial Sequence
  Synthetic construct
aaaccagggccaccgaaagg

SEQ ID NO: 1350 - DNA, 20 bp, Artificial Sequence
  Synthetic construct
ccctcgcgcttgaggccgcg

SEQ ID NO: 1351 - DNA, 20 bp, Artificial Sequence
  Synthetic construct
cttcggtctcttcgacgacg

SEQ ID NO: 1352 - DNA, 20 bp, Artificial Sequence
  Synthetic construct
tcggggtaatagaacgcagg

SEQ ID NO: 1353 - DNA, 20 bp, Artificial Sequence
  Synthetic construct
caaaatctcaccctgaaacg

SEQ ID NO: 1354 - DNA, 20 bp, Artificial Sequence
  Synthetic construct
ccacggcgaagcgccctccg

SEQ ID NO: 1355 - DNA, 20 bp, Artificial Sequence
  Synthetic construct
ggacacataatggcaaatcg

SEQ ID NO: 1356 - DNA, 20 bp, Artificial Sequence
  Synthetic construct
tgggtggtactgccatccgg

SEQ ID NO: 1357 - DNA, 20 bp, Artificial Sequence
  Synthetic construct
ccacttgttaacagagaccg

SEQ ID NO: 1358 - DNA, 20 bp, Artificial Sequence
  Synthetic construct
cttgtggcgctgaaaacgaa

SEQ ID NO: 1359 - DNA, 20 bp, Artificial Sequence
  Synthetic construct
tatgccatgagtgctcagag

SEQ ID NO: 1360 - DNA, 20 bp, Artificial Sequence
  Synthetic construct
tgagagactccagttgccag

SEQ ID NO: 1361 - DNA, 20 bp, Artificial Sequence
  Synthetic construct
aacaggcattccggaaacgg

SEQ ID NO: 1362 - DNA, 20 bp, Artificial Sequence
  Synthetic construct
aggtcacgttctgcacaaag

SEQ ID NO: 1363 - DNA, 20 bp, Artificial Sequence
  Synthetic construct
ctaacttggacccaaactca

SEQ ID NO: 1364 - DNA, 20 bp, Artificial Sequence
  Synthetic construct
gcattacccctactaccgga

SEQ ID NO: 1365 - DNA, 20 bp, Artificial Sequence
  Synthetic construct
accaggcacacaagagactg

SEQ ID NO: 1366 - DNA, 20 bp, Artificial Sequence
  Synthetic construct
agaaatacggtccgaaacgt

SEQ ID NO: 1367 - DNA, 20 bp, Artificial Sequence
  Synthetic construct
agtctggaaagcgtcacttg

SEQ ID NO: 1368 - DNA, 20 bp, Artificial Sequence
  Synthetic construct
tatttacatgtaacgctaca

SEQ ID NO: 1369 - DNA, 20 bp, Artificial Sequence
  Synthetic construct
aagtcgacatactctcggct

SEQ ID NO: 1370 - DNA, 20 bp, Artificial Sequence
  Synthetic construct
cctgcctcacctcacactcg

SEQ ID NO: 1371 - DNA, 20 bp, Artificial Sequence
  Synthetic construct
gccgacttacgatttccgag

SEQ ID NO: 1372 - DNA, 20 bp, Artificial Sequence
  Synthetic construct
ggagtctgtgttatctggaa

SEQ ID NO: 1373 - DNA, 20 bp, Artificial Sequence
  Synthetic construct
ccctggatagaatacatcgt

SEQ ID NO: 1374 - DNA, 20 bp, Artificial Sequence
  Synthetic construct
gacaagatgtcagacctagg

SEQ ID NO: 1375 - DNA, 20 bp, Artificial Sequence
  Synthetic construct
gaggtggaaggtaaacacaa

SEQ ID NO: 1376 - DNA, 20 bp, Artificial Sequence
  Synthetic construct
ttctaggataaccaccactg

SEQ ID NO: 1377 - DNA, 20 bp, Artificial Sequence
  Synthetic construct
acatcgactgctggacaatg

SEQ ID NO: 1378 - DNA, 20 bp, Artificial Sequence
  Synthetic construct
cagtgagtagtgccaaacca

SEQ ID NO: 1379 - DNA, 20 bp, Artificial Sequence
  Synthetic construct
gtggcgtactgcacgtgtcg

SEQ ID NO: 1380 - DNA, 20 bp, Artificial Sequence
  Synthetic construct
ttcacattatgaccaacacc

SEQ ID NO: 1381 - DNA, 30 bp, Artificial Sequence
  Synthetic construct
gtgacgatccaaatttgaacgccgtggaca

SEQ ID NO: 1382 - DNA, 30 bp, Artificial Sequence
  Synthetic construct
aaaagagcaaactgcgttatacagaggagg

SEQ ID NO: 1383 - DNA, 30 bp, Artificial Sequence
  Synthetic construct
ccacttaccccagaaccagacggatggggg

SEQ ID NO: 1384 - DNA, 30 bp, Artificial Sequence
  Synthetic construct
gcagtttgtgcagttatgccagcagggaca

SEQ ID NO: 1385 - DNA, 30 bp, Artificial Sequence
  Synthetic construct
cactagcattatccaaagagtccggggata

SEQ ID NO: 1386 - DNA, 30 bp, Artificial Sequence
  Synthetic construct
tataggaaacttgctgaacacccgcgggat

SEQ ID NO: 1387 - DNA, 30 bp, Artificial Sequence
  Synthetic construct
aacttccaaatggtaacgttcatgggggcc

SEQ ID NO: 1388 - DNA, 30 bp, Artificial Sequence
  Synthetic construct
tcactgtggattacttatataacaaggaaa

SEQ ID NO: 1389 - DNA, 30 bp, Artificial Sequence
  Synthetic construct
gagaccagtcgacacccatcattgaggttg

SEQ ID NO: 1390 - DNA, 30 bp, Artificial Sequence
  Synthetic construct
tcttccccagtaaacgctccacagaggcag

SEQ ID NO: 1391 - DNA, 30 bp, Artificial Sequence
  Synthetic construct
tagagaacgtcaccttagaatccgtggcca

SEQ ID NO: 1392 - DNA, 30 bp, Artificial Sequence
  Synthetic construct
tccatctttgtctgccacaaacgtgggagt

SEQ ID NO: 1393 - DNA, 30 bp, Artificial Sequence; identical to SEQ ID NO: 585
  Synthetic construct

SEQ ID NO: 1394 - DNA, 30 bp, Artificial Sequence; identical to SEQ ID NO: 586
  Synthetic construct

SEQ ID NO: 1395 - DNA, 30 bp, Artificial Sequence; identical to SEQ ID NO: 587
  Synthetic construct

SEQ ID NO: 1396 - DNA, 30 bp, Artificial Sequence; identical to SEQ ID NO: 588
  Synthetic construct

SEQ ID NO: 1397 - DNA, 30 bp, Artificial Sequence; identical to SEQ ID NO: 1161
  Synthetic construct

SEQ ID NO: 1398 - DNA, 30 bp, Artificial Sequence; identical to SEQ ID NO: 1162
  Synthetic construct

SEQ ID NO: 1399 - DNA, 30 bp, Artificial Sequence; identical to SEQ ID NO: 1163
  Synthetic construct

SEQ ID NO: 1400 - DNA, 30 bp, Artificial Sequence; identical to SEQ ID NO: 1164
  Synthetic construct

SEQ ID NO: 1401 - DNA, 30 bp, Artificial Sequence; identical to SEQ ID NO: 617
  Synthetic construct

SEQ ID NO: 1402 - DNA, 30 bp, Artificial Sequence; identical to SEQ ID NO: 618
  Synthetic construct

SEQ ID NO: 1403 - DNA, 30 bp, Artificial Sequence; identical to SEQ ID NO: 619
  Synthetic construct

SEQ ID NO: 1404 - DNA, 30 bp, Artificial Sequence; identical to SEQ ID NO: 620
  Synthetic construct

SEQ ID NO: 1405 - DNA, 30 bp, Artificial Sequence
  Synthetic construct
tacaatgatgtttgatgaccgtcgcggacg

SEQ ID NO: 1406 - DNA, 30 bp, Artificial Sequence
  Synthetic construct
taaactgttgggacataccgctcggggcca

SEQ ID NO: 1407 - DNA, 30 bp, Artificial Sequence
  Synthetic construct
ttatgatgatatgagccctcgtcgaggacc

SEQ ID NO: 1408 - DNA, 30 bp, Artificial Sequence
  Synthetic construct
gtgctaaaatcaaagaacttcgagaggtaa

SEQ ID NO: 1409 - DNA, 30 bp, Artificial Sequence
  Synthetic construct
ccctactcgactacggcgtcaccgcggacg

SEQ ID NO: 1410 - DNA, 30 bp, Artificial Sequence
  Synthetic construct
atatcccactccatagaatctccgggggca

SEQ ID NO: 1411 - DNA, 30 bp, Artificial Sequence
  Synthetic construct
gtttctgcaactgaaacgcaagcgaggagg

SEQ ID NO: 1412 - DNA, 30 bp, Artificial Sequence
  Synthetic construct
acgagggaccagccaagatcgaggtggacc

SEQ ID NO: 1413 - DNA, 30 bp, Artificial Sequence; identical to SEQ ID NO: 893
  Synthetic construct

SEQ ID NO: 1414 - DNA, 30 bp, Artificial Sequence; identical to SEQ ID NO: 894
  Synthetic construct

SEQ ID NO: 1415 - DNA, 30 bp, Artificial Sequence; identical to SEQ ID NO: 895
  Synthetic construct

SEQ ID NO: 1416 - DNA, 30 bp, Artificial Sequence; identical to SEQ ID NO: 896
  Synthetic construct

SEQ ID NO: 1417 - DNA, 30 bp, Artificial Sequence
  Synthetic construct
cctcagagtgcatcgacccctcggtggtct

SEQ ID NO: 1418 - DNA, 30 bp, Artificial Sequence
  Synthetic construct
tgccctgcggggaggactccgtcgaggaga

SEQ ID NO: 1419 - DNA, 30 bp, Artificial Sequence
  Synthetic construct
ctcccttcggggagacaacgacggcggtgg

SEQ ID NO: 1420 - DNA, 30 bp, Artificial Sequence
  Synthetic construct
tacggctgcaccgagtcgtagtcgaggtca

SEQ ID NO: 1421 - DNA, 30 bp, Artificial Sequence; identical to SEQ ID NO: 597
  Synthetic construct

SEQ ID NO: 1422 - DNA, 30 bp, Artificial Sequence; identical to SEQ ID NO: 598
  Synthetic construct

SEQ ID NO: 1423 - DNA, 30 bp, Artificial Sequence; identical to SEQ ID NO: 599
  Synthetic construct

SEQ ID NO: 1424 - DNA, 30 bp, Artificial Sequence; identical to SEQ ID NO: 600
  Synthetic construct

SEQ ID NO: 1425 - DNA, 30 bp, Artificial Sequence; identical to SEQ ID NO: 857
  Synthetic construct

SEQ ID NO: 1426 - DNA, 30 bp, Artificial Sequence; identical to SEQ ID NO: 858
  Synthetic construct

SEQ ID NO: 1427 - DNA, 30 bp, Artificial Sequence; identical to SEQ ID NO: 859
  Synthetic construct

SEQ ID NO: 1428 - DNA, 30 bp, Artificial Sequence; identical to SEQ ID NO: 860
  Synthetic construct

SEQ ID NO: 1429 - DNA, 30 bp, Artificial Sequence; identical to SEQ ID NO: 417
  Synthetic construct

SEQ ID NO: 1430 - DNA, 30 bp, Artificial Sequence; identical to SEQ ID NO: 418
  Synthetic construct

SEQ ID NO: 1431 - DNA, 30 bp, Artificial Sequence; identical to SEQ ID NO: 419
  Synthetic construct

SEQ ID NO: 1432 - DNA, 30 bp, Artificial Sequence; identical to SEQ ID NO: 420
  Synthetic construct

SEQ ID NO: 1433 - DNA, 30 bp, Artificial Sequence; identical to SEQ ID NO: 393
  Synthetic construct

SEQ ID NO: 1434 - DNA, 30 bp, Artificial Sequence; identical to SEQ ID NO: 394
  Synthetic construct

SEQ ID NO: 1435 - DNA, 30 bp, Artificial Sequence; identical to SEQ ID NO: 395
  Synthetic construct

SEQ ID NO: 1436 - DNA, 30 bp, Artificial Sequence; identical to SEQ ID NO: 396
  Synthetic construct

SEQ ID NO: 1437 - DNA, 30 bp, Artificial Sequence; identical to SEQ ID NO: 1213
  Synthetic construct

SEQ ID NO: 1438 - DNA, 30 bp, Artificial Sequence; identical to SEQ ID NO: 1214
  Synthetic construct

SEQ ID NO: 1439 - DNA, 30 bp, Artificial Sequence; identical to SEQ ID NO: 1215
  Synthetic construct

SEQ ID NO: 1440 - DNA, 30 bp, Artificial Sequence; identical to SEQ ID NO: 1216
  Synthetic construct

SEQ ID NO: 1441 - DNA, 30 bp, Artificial Sequence
  Synthetic construct
gccgaaaccagggccaccgaaaggcggcgg

SEQ ID NO: 1442 - DNA, 30 bp, Artificial Sequence
  Synthetic construct
ggcgccctcgcgcttgaggccgcgcggtcc

SEQ ID NO: 1443 - DNA, 30 bp, Artificial Sequence
  Synthetic construct
cagccttcggtctcttcgacgacgcggccg

SEQ ID NO: 1444 - DNA, 30 bp, Artificial Sequence
  Synthetic construct
gggttcggggtaatagaacgcaggcggcgg

SEQ ID NO: 1445 - DNA, 30 bp, Artificial Sequence
  Synthetic construct
agaccaaaatctcaccctgaaacggggaag

SEQ ID NO: 1446 - DNA, 30 bp, Artificial Sequence
  Synthetic construct
actcccacggcgaagcgccctccgtggacg

SEQ ID NO: 1447 - DNA, 30 bp, Artificial Sequence
  Synthetic construct
atgcggacacataatggcaaatcgggggcc

SEQ ID NO: 1448 - DNA, 30 bp, Artificial Sequence
  Synthetic construct
gttatgggtggtactgccatccggaggagg

SEQ ID NO: 1449 - DNA, 30 bp, Artificial Sequence
  Synthetic construct
tgttccacttgttaacagagaccggggaag

SEQ ID NO: 1450 - DNA, 30 bp, Artificial Sequence
  Synthetic construct
gaagcttgtggcgctgaaaacgaacggtaa

SEQ ID NO: 1451 - DNA, 30 bp, Artificial Sequence
  Synthetic construct
cctttatgccatgagtgctcagagaggcgg

SEQ ID NO: 1452 - DNA, 30 bp, Artificial Sequence
  Synthetic construct
gatttgagagactccagttgccagcggaat

SEQ ID NO: 1453 - DNA, 30 bp, Artificial Sequence
  Synthetic construct
gtggaacaggcattccggaaacggaggcag

SEQ ID NO: 1454 - DNA, 30 bp, Artificial Sequence
  Synthetic construct
tccgaggtcacgttctgcacaaagcggtaa

SEQ ID NO: 1455 - DNA, 30 bp, Artificial Sequence
  Synthetic construct
gaagctaacttggacccaaactcagggtcg

SEQ ID NO: 1456 - DNA, 30 bp, Artificial Sequence
  Synthetic construct
ccaagcattacccctactaccggacggccg

SEQ ID NO: 1457 - DNA, 30 bp, Artificial Sequence; identical to SEQ ID NO: 609
  Synthetic construct

SEQ ID NO: 1458 - DNA, 30 bp, Artificial Sequence; identical to SEQ ID NO: 610
  Synthetic construct

SEQ ID NO: 1459 - DNA, 30 bp, Artificial Sequence; identical to SEQ ID NO: 611
  Synthetic construct

SEQ ID NO: 1460 - DNA, 30 bp, Artificial Sequence; identical to SEQ ID NO: 612
  Synthetic construct

SEQ ID NO: 1461 - DNA, 30 bp, Artificial Sequence; identical to SEQ ID NO: 717
  Synthetic construct

SEQ ID NO: 1462 - DNA, 30 bp, Artificial Sequence; identical to SEQ ID NO: 718
  Synthetic construct

SEQ ID NO: 1463 - DNA, 30 bp, Artificial Sequence; identical to SEQ ID NO: 719
  Synthetic construct

SEQ ID NO: 1464 - DNA, 30 bp, Artificial Sequence; identical to SEQ ID NO: 720
  Synthetic construct

SEQ ID NO: 1465 - DNA, 30 bp, Artificial Sequence
  Synthetic construct
cggtccctggatagaatacatcgtcggaac

SEQ ID NO: 1466 - DNA, 30 bp, Artificial Sequence
  Synthetic construct
ttcagacaagatgtcagacctagggggcag

SEQ ID NO: 1467 - DNA, 30 bp, Artificial Sequence
  Synthetic construct
gtcagaggtggaaggtaaacacaaggggat

SEQ ID NO: 1468 - DNA, 30 bp, Artificial Sequence
  Synthetic construct
ttttttctaggataaccaccactgtggcca

SEQ ID NO: 1469 - DNA, 30 bp, Artificial Sequence; identical to SEQ ID NO: 397
  Synthetic construct

SEQ ID NO: 1470 - DNA, 30 bp, Artificial Sequence; identical to SEQ ID NO: 398
  Synthetic construct

SEQ ID NO: 1471 - DNA, 30 bp, Artificial Sequence; identical to SEQ ID NO: 399
  Synthetic construct

SEQ ID NO: 1472 - DNA, 30 bp, Artificial Sequence; identical to SEQ ID NO: 400
  Synthetic construct

SEQ ID NO: 1473 - DNA, 20 bp, Artificial Sequence
  Synthetic construct
ggatacagggctctacacag

SEQ ID NO: 1474 - DNA, 20 bp, Artificial Sequence
  Synthetic construct
tggctttgaatgtggcgtgt

SEQ ID NO: 1475 - DNA, 20 bp, Artificial Sequence
  Synthetic construct
ttgtttcgttgtgttccgag

SEQ ID NO: 1476 - DNA, 20 bp, Artificial Sequence
  Synthetic construct
cagccaggacaacaatgcga

SEQ ID NO: 1477 - DNA, 20 bp, Artificial Sequence
  Synthetic construct
gtggccttaatgttctcctg

SEQ ID NO: 1478 - DNA, 20 bp, Artificial Sequence
  Synthetic construct
gttcattgtacaatatatgg

SEQ ID NO: 1479 - DNA, 20 bp, Artificial Sequence
  Synthetic construct
taagaggtcagaccgtcgtg

SEQ ID NO: 1480 - DNA, 20 bp, Artificial Sequence
  Synthetic construct
agaggaggagacacatgtcg

SEQ ID NO: 1481 - DNA, 20 bp, Artificial Sequence
  Synthetic construct
catacaccatgtccatagag

SEQ ID NO: 1482 - DNA, 20 bp, Artificial Sequence
  Synthetic construct
gccttctgacaattcagccc

SEQ ID NO: 1483 - DNA, 20 bp, Artificial Sequence
  Synthetic construct
gttctgtagacttcacatgc

SEQ ID NO: 1484 - DNA, 20 bp, Artificial Sequence
  Synthetic construct
acattctgtacaatgaacag

SEQ ID NO: 1485 - DNA, 20 bp, Artificial Sequence
  Synthetic construct
atcaagcgtgctgaccggcg

SEQ ID NO: 1486 - DNA, 20 bp, Artificial Sequence
  Synthetic construct
cagccaggaccacaatgcca

SEQ ID NO: 1487 - DNA, 20 bp, Artificial Sequence
  Synthetic construct
cgtgcacatgaatccccccc

SEQ ID NO: 1488 - DNA, 20 bp, Artificial Sequence
  Synthetic construct
aggtaccctccgacccacca

SEQ ID NO: 1489 - DNA, 20 bp, Artificial Sequence
  Synthetic construct
cagggagtgtgtgaactgtg

SEQ ID NO: 1490 - DNA, 20 bp, Artificial Sequence
  Synthetic construct
ggagctgtactcgggcacgt

SEQ ID NO: 1491 - DNA, 20 bp, Artificial Sequence
  Synthetic construct
tccaagacgtccatccacca

SEQ ID NO: 1492 - DNA, 20 bp, Artificial Sequence
  Synthetic construct
aagatcagtagcggtcccgg

SEQ ID NO: 1493 - DNA, 20 bp, Artificial Sequence
  Synthetic construct
agaaaggacgtcgatcgagg

SEQ ID NO: 1494 - DNA, 20 bp, Artificial Sequence
  Synthetic construct
aggggtcttaatgatccgcg

SEQ ID NO: 1495 - DNA, 20 bp, Artificial Sequence
  Synthetic construct
ttgaccataattatgctcag

SEQ ID NO: 1496 - DNA, 20 bp, Artificial Sequence
  Synthetic construct
agagcgtgcagataatgaca

SEQ ID NO: 1497 - DNA, 20 bp, Artificial Sequence
  Synthetic construct
agctggcagaccacaaactg

SEQ ID NO: 1498 - DNA, 20 bp, Artificial Sequence
  Synthetic construct
attcttcataccaggaccag

SEQ ID NO: 1499 - DNA, 20 bp, Artificial Sequence
  Synthetic construct
ccaattcaggacccacacga

SEQ ID NO: 1500 - DNA, 20 bp, Artificial Sequence
  Synthetic construct
actacgacctgaatgctgtg

SEQ ID NO: 1501 - DNA, 20 bp, Artificial Sequence
  Synthetic construct
gcttccgctacaagtgcgag

SEQ ID NO: 1502 - DNA, 20 bp, Artificial Sequence
  Synthetic construct
ggaagatctcatccccaccg

SEQ ID NO: 1503 - DNA, 20 bp, Artificial Sequence
  Synthetic construct
tcaatggctacacaggacca

SEQ ID NO: 1504 - DNA, 20 bp, Artificial Sequence
  Synthetic construct
cttactaatgaagtaatccg

SEQ ID NO: 1505 - DNA, 20 bp, Artificial Sequence
  Synthetic construct
gagaaagcagtctttaccca

SEQ ID NO: 1506 - DNA, 20 bp, Artificial Sequence
  Synthetic construct
ggtctcggagaatgaccgag

SEQ ID NO: 1507 - DNA, 20 bp, Artificial Sequence
  Synthetic construct
tgcatggggaggaccagtcg

SEQ ID NO: 1508 - DNA, 20 bp, Artificial Sequence
  Synthetic construct
aaagaacaaatggaacgcga

SEQ ID NO: 1509 - DNA, 20 bp, Artificial Sequence
  Synthetic construct
cacctagtaagtcgtttagg

SEQ ID NO: 1510 - DNA, 20 bp, Artificial Sequence
  Synthetic construct
catgccagttcacagcagtg

SEQ ID NO: 1511 - DNA, 20 bp, Artificial Sequence
  Synthetic construct
cattgcctcaggaacaaagg

SEQ ID NO: 1512 - DNA, 20 bp, Artificial Sequence
  Synthetic construct
acggctatgtgcaatctgcg

SEQ ID NO: 1513 - DNA, 20 bp, Artificial Sequence
  Synthetic construct
gccctggctggatcccgcag

SEQ ID NO: 1514 - DNA, 20 bp, Artificial Sequence
  Synthetic construct
ggacaacaaagactgcacag

SEQ ID NO: 1515 - DNA, 20 bp, Artificial Sequence
  Synthetic construct
gtggcttcacatcttcaggg

SEQ ID NO: 1516 - DNA, 20 bp, Artificial Sequence
  Synthetic construct
agatcgaagtatgcctcacc

SEQ ID NO: 1517 - DNA, 20 bp, Artificial Sequence
  Synthetic construct
agtgcatactgtagtccttg

SEQ ID NO: 1518 - DNA, 20 bp, Artificial Sequence
  Synthetic construct
gagcccccaactgacgaatg

SEQ ID NO: 1519 - DNA, 20 bp, Artificial Sequence
  Synthetic construct
taattagtactactatgcac

SEQ ID NO: 1520 - DNA, 20 bp, Artificial Sequence
  Synthetic construct
caatgaacgagcaacagcaa

SEQ ID NO: 1521 - DNA, 20 bp, Artificial Sequence
  Synthetic construct
ccgtacactcagcatgaccc

SEQ ID NO: 1522 - DNA, 20 bp, Artificial Sequence
  Synthetic construct
gaaatcgccaggcagttcgg

SEQ ID NO: 1523 - DNA, 20 bp, Artificial Sequence
  Synthetic construct
tccaggatcagttcaaaccg

SEQ ID NO: 1524 - DNA, 20 bp, Artificial Sequence
  Synthetic construct
acagctcaagcgcttcatcc

SEQ ID NO: 1525 - DNA, 20 bp, Artificial Sequence
  Synthetic construct
aggctccccggacatctggg

SEQ ID NO: 1526 - DNA, 20 bp, Artificial Sequence
  Synthetic construct
cactaacccccgagactcag

SEQ ID NO: 1527 - DNA, 20 bp, Artificial Sequence
  Synthetic construct
cgcatgcagagcatcaacgc

SEQ ID NO: 1528 - DNA, 20 bp, Artificial Sequence
  Synthetic construct
aagatgaactgcgatgtgtg

SEQ ID NO: 1529 - DNA, 20 bp, Artificial Sequence
  Synthetic construct
caagcagagaagttcccttg

SEQ ID NO: 1530 - DNA, 20 bp, Artificial Sequence
  Synthetic construct
gctcatacagacccgcatga

SEQ ID NO: 1531 - DNA, 20 bp, Artificial Sequence
  Synthetic construct
ggacagattagcaagcaatg

SEQ ID NO: 1532 - DNA, 20 bp, Artificial Sequence
  Synthetic construct
aggttggtgactgtgaacgc

SEQ ID NO: 1533 - DNA, 20 bp, Artificial Sequence
  Synthetic construct
agttcatcgacaacaagctg

SEQ ID NO: 1534 - DNA, 20 bp, Artificial Sequence
  Synthetic construct
gggctgacactagcagacac

SEQ ID NO: 1535 - DNA, 20 bp, Artificial Sequence
  Synthetic construct
tctgttgtggggtctgaacg

SEQ ID NO: 1536 - DNA, 20 bp, Artificial Sequence
  Synthetic construct
aaagctccacatataaatgg

SEQ ID NO: 1537 - DNA, 20 bp, Artificial Sequence
  Synthetic construct
acaaagcagctcatgagcca

SEQ ID NO: 1538 - DNA, 20 bp, Artificial Sequence
  Synthetic construct
caacattaaagcctggacac

SEQ ID NO: 1539 - DNA, 20 bp, Artificial Sequence
  Synthetic construct
tgaaggcaattgtgtcatcg

SEQ ID NO: 1540 - DNA, 20 bp, Artificial Sequence
  Synthetic construct
acagaacgcggctctacgca

SEQ ID NO: 1541 - DNA, 20 bp, Artificial Sequence
  Synthetic construct
aggactctacctgtttgcca

SEQ ID NO: 1542 - DNA, 20 bp, Artificial Sequence
  Synthetic construct
atgtgagaagagttcagagg

SEQ ID NO: 1543 - DNA, 20 bp, Artificial Sequence
  Synthetic construct
ggagatcaagcagctcacag

SEQ ID NO: 1544 - DNA, 20 bp, Artificial Sequence
  Synthetic construct
actgtcactaacctactggt

SEQ ID NO: 1545 - DNA, 20 bp, Artificial Sequence
  Synthetic construct
cccgcccgctgactgcacat

SEQ ID NO: 1546 - DNA, 20 bp, Artificial Sequence
  Synthetic construct
ctctaccgcccggaaaacgt

SEQ ID NO: 1547 - DNA, 20 bp, Artificial Sequence
  Synthetic construct
ttgggccagagtacgatgca

SEQ ID NO: 1548 - DNA, 20 bp, Artificial Sequence
  Synthetic construct
gaaaatgaatggctcccaca

SEQ ID NO: 1549 - DNA, 20 bp, Artificial Sequence
  Synthetic construct
gatggcttggtccatcacgt

SEQ ID NO: 1550 - DNA, 20 bp, Artificial Sequence
  Synthetic construct
ggggcctcattcacccagaa

SEQ ID NO: 1551 - DNA, 20 bp, Artificial Sequence
  Synthetic construct
tccaagagtgacagagtcgt

SEQ ID NO: 1552 - DNA, 20 bp, Artificial Sequence
  Synthetic construct
cagacccgtacaaagtgtac

SEQ ID NO: 1553 - DNA, 20 bp, Artificial Sequence
  Synthetic construct
cccatgacgtttggaccccg

SEQ ID NO: 1554 - DNA, 20 bp, Artificial Sequence
  Synthetic construct
ctaccgggaaatcctcgtga

SEQ ID NO: 1555 - DNA, 20 bp, Artificial Sequence
  Synthetic construct
ctgatcgaccagatcgacag

SEQ ID NO: 1556 - DNA, 20 bp, Artificial Sequence
  Synthetic construct
agccggtccctttcccgtcg

SEQ ID NO: 1557 - DNA, 20 bp, Artificial Sequence
  Synthetic construct
cctcagttggcaaggtacct

SEQ ID NO: 1558 - DNA, 20 bp, Artificial Sequence
  Synthetic construct
cctctcaatcaaaataaggt

SEQ ID NO: 1559 - DNA, 20 bp, Artificial Sequence
  Synthetic construct
cgaaaatctgggctaagtgc

SEQ ID NO: 1560 - DNA, 20 bp, Artificial Sequence
  Synthetic construct
actctccaggcttaacacag

SEQ ID NO: 1561 - DNA, 20 bp, Artificial Sequence
  Synthetic construct
agctctcgaagactgctgtg

SEQ ID NO: 1562 - DNA, 20 bp, Artificial Sequence
  Synthetic construct
gtgtacaaattcctgcacca

SEQ ID NO: 1563 - DNA, 20 bp, Artificial Sequence
  Synthetic construct
tgacgcggaggcgtattcgg

SEQ ID NO: 1564 - DNA, 20 bp, Artificial Sequence
  Synthetic construct
aagtgatatgcactacagtg

SEQ ID NO: 1565 - DNA, 20 bp, Artificial Sequence
  Synthetic construct
caagacatcatggcctatcg

SEQ ID NO: 1566 - DNA, 20 bp, Artificial Sequence
  Synthetic construct
catctgcaggtacatagccg

SEQ ID NO: 1567 - DNA, 20 bp, Artificial Sequence
  Synthetic construct
tccctcacctgcaggccatg

SEQ ID NO: 1568 - DNA, 20 bp, Artificial Sequence
  Synthetic construct
atcacggaagtctcgtcctg

SEQ ID NO: 1569 - DNA, 20 bp, Artificial Sequence
  Synthetic construct
gcatgtgcggtcgcacaccg

SEQ ID NO: 1570 - DNA, 20 bp, Artificial Sequence
  Synthetic construct
ggcagcttacggcgacacat

SEQ ID NO: 1571 - DNA, 20 bp, Artificial Sequence
  Synthetic construct
tggtctacgtgccctcgcag

SEQ ID NO: 1572 - DNA, 20 bp, Artificial Sequence
  Synthetic construct
caccagcacgagcgtatggt

SEQ ID NO: 1573 - DNA, 20 bp, Artificial Sequence
  Synthetic construct
ctatcccgcccccttctacg

SEQ ID NO: 1574 - DNA, 20 bp, Artificial Sequence
  Synthetic construct
gctgggcgataaggcaccgg

SEQ ID NO: 1575 - DNA, 20 bp, Artificial Sequence
  Synthetic construct
gttattgcttgagtgatccg

SEQ ID NO: 1576 - DNA, 20 bp, Artificial Sequence
  Synthetic construct
agatattgaccatgagacag

SEQ ID NO: 1577 - DNA, 20 bp, Artificial Sequence
  Synthetic construct
ggagaccatcgagaccacag

SEQ ID NO: 1578 - DNA, 20 bp, Artificial Sequence
  Synthetic construct
ggtcaccgacgacccgaccc

SEQ ID NO: 1579 - DNA, 20 bp, Artificial Sequence
  Synthetic construct
tgaacaaacgctggtcaccg

SEQ ID NO: 1580 - DNA, 20 bp, Artificial Sequence
  Synthetic construct
ccttactctctccatgtcag

SEQ ID NO: 1581 - DNA, 20 bp, Artificial Sequence
  Synthetic construct
gaactcgatgagcccctgcg

SEQ ID NO: 1582 - DNA, 20 bp, Artificial Sequence
  Synthetic construct
gctcatcgacgactacggag

SEQ ID NO: 1583 - DNA, 20 bp, Artificial Sequence
  Synthetic construct
tccgccagacggtcaaccgg

SEQ ID NO: 1584 - DNA, 30 bp, Artificial Sequence
  Synthetic construct
ccagggatacagggctctacacagaggtcc

SEQ ID NO: 1585 - DNA, 30 bp, Artificial Sequence
  Synthetic construct
gccatggctttgaatgtggcgtgtgggatc

SEQ ID NO: 1586 - DNA, 30 bp, Artificial Sequence
  Synthetic construct
tcacttgtttcgttgtgttccgagtggcta

SEQ ID NO: 1587 - DNA, 30 bp, Artificial Sequence; identical to SEQ ID NO: 701
  Synthetic construct

SEQ ID NO: 1588 - DNA, 30 bp, Artificial Sequence; identical to SEQ ID NO: 702
  Synthetic construct

SEQ ID NO: 1589 - DNA, 30 bp, Artificial Sequence; identical to SEQ ID NO: 703
  Synthetic construct

SEQ ID NO: 1590 - DNA, 30 bp, Artificial Sequence; identical to SEQ ID NO: 704
  Synthetic construct

SEQ ID NO: 1591 - DNA, 30 bp, Artificial Sequence; identical to SEQ ID NO: 385
  Synthetic construct

SEQ ID NO: 1592 - DNA, 30 bp, Artificial Sequence; identical to SEQ ID NO: 386
  Synthetic construct

SEQ ID NO: 1593 - DNA, 30 bp, Artificial Sequence; identical to SEQ ID NO: 387
  Synthetic construct

SEQ ID NO: 1594 - DNA, 30 bp, Artificial Sequence; identical to SEQ ID NO: 388
  Synthetic construct

SEQ ID NO: 1595 - DNA, 30 bp, Artificial Sequence; identical to SEQ ID NO: 745
  Synthetic construct

SEQ ID NO: 1596 - DNA, 30 bp, Artificial Sequence; identical to SEQ ID NO: 746
  Synthetic construct

SEQ ID NO: 1597 - DNA, 30 bp, Artificial Sequence; identical to SEQ ID NO: 747
  Synthetic construct

SEQ ID NO: 1598 - DNA, 30 bp, Artificial Sequence; identical to SEQ ID NO: 748
  Synthetic construct

SEQ ID NO: 1599 - DNA, 30 bp, Artificial Sequence; identical to SEQ ID NO: 697
  Synthetic construct

SEQ ID NO: 1600 - DNA, 30 bp, Artificial Sequence; identical to SEQ ID NO: 698
  Synthetic construct

SEQ ID NO: 1601 - DNA, 30 bp, Artificial Sequence; identical to SEQ ID NO: 699
  Synthetic construct

SEQ ID NO: 1602 - DNA, 30 bp, Artificial Sequence; identical to SEQ ID NO: 700
  Synthetic construct

SEQ ID NO: 1603 - DNA, 30 bp, Artificial Sequence; identical to SEQ ID NO: 405
  Synthetic construct

SEQ ID NO: 1604 - DNA, 30 bp, Artificial Sequence; identical to SEQ ID NO: 406
  Synthetic construct

SEQ ID NO: 1605 - DNA, 30 bp, Artificial Sequence; identical to SEQ ID NO: 407
  Synthetic construct

SEQ ID NO: 1606 - DNA, 30 bp, Artificial Sequence; identical to SEQ ID NO: 408
  Synthetic construct

SEQ ID NO: 1607 - DNA, 30 bp, Artificial Sequence; identical to SEQ ID NO: 389
  Synthetic construct

SEQ ID NO: 1608 - DNA, 30 bp, Artificial Sequence; identical to SEQ ID NO: 390
  Synthetic construct

SEQ ID NO: 1609 - DNA, 30 bp, Artificial Sequence; identical to SEQ ID NO: 391
  Synthetic construct

SEQ ID NO: 1610 - DNA, 30 bp, Artificial Sequence; identical to SEQ ID NO: 392
  Synthetic construct

SEQ ID NO: 1611 - DNA, 30 bp, Artificial Sequence; identical to SEQ ID NO: 421
  Synthetic construct

SEQ ID NO: 1612 - DNA, 30 bp, Artificial Sequence; identical to SEQ ID NO: 422
  Synthetic construct

SEQ ID NO: 1613 - DNA, 30 bp, Artificial Sequence; identical to SEQ ID NO: 423
  Synthetic construct

SEQ ID NO: 1614 - DNA, 30 bp, Artificial Sequence; identical to SEQ ID NO: 424
  Synthetic construct

SEQ ID NO: 1615 - DNA, 30 bp, Artificial Sequence; identical to SEQ ID NO: 601
  Synthetic construct

SEQ ID NO: 1616 - DNA, 30 bp, Artificial Sequence; identical to SEQ ID NO: 602
  Synthetic construct

SEQ ID NO: 1617 - DNA, 30 bp, Artificial Sequence; identical to SEQ ID NO: 603
  Synthetic construct

SEQ ID NO: 1618 - DNA, 30 bp, Artificial Sequence; identical to SEQ ID NO: 604
  Synthetic construct

SEQ ID NO: 1619 - DNA, 30 bp, Artificial Sequence; identical to SEQ ID NO: 1249
  Synthetic construct

SEQ ID NO: 1620 - DNA, 30 bp, Artificial Sequence; identical to SEQ ID NO: 1250
  Synthetic construct

SEQ ID NO: 1621 - DNA, 30 bp, Artificial Sequence; identical to SEQ ID NO: 1251
  Synthetic construct

SEQ ID NO: 1622 - DNA, 30 bp, Artificial Sequence; identical to SEQ ID NO: 1252
  Synthetic construct

SEQ ID NO: 1623 - DNA, 30 bp, Artificial Sequence
  Synthetic construct
gcaaacggctatgtgcaatctgcggggaca

SEQ ID NO: 1624 - DNA, 30 bp, Artificial Sequence
  Synthetic construct
gacggccctggctggatcccgcagcggcgg

SEQ ID NO: 1625 - DNA, 30 bp, Artificial Sequence
  Synthetic construct
gccgggacaacaaagactgcacagtggaca

SEQ ID NO: 1626 - DNA, 30 bp, Artificial Sequence
  Synthetic construct
actggtggcttcacatcttcaggggggcca

SEQ ID NO: 1627 - DNA, 30 bp, Artificial Sequence
  Synthetic construct
ttcaagatcgaagtatgcctcaccaggaga

SEQ ID NO: 1628 - DNA, 30 bp, Artificial Sequence
  Synthetic construct
attaagtgcatactgtagtccttgaggaag

SEQ ID NO: 1629 - DNA, 30 bp, Artificial Sequence
  Synthetic construct
atgcgagcccccaactgacgaatgtggcat

SEQ ID NO: 1630 - DNA, 30 bp, Artificial Sequence
  Synthetic construct
atcataattagtactactatgcacaggttt

SEQ ID NO: 1631 - DNA, 30 bp, Artificial Sequence
  Synthetic construct
tgggcaatgaacgagcaacagcaaaggaga

SEQ ID NO: 1632 - DNA, 30 bp, Artificial Sequence
  Synthetic construct
tgggccgtacactcagcatgaccctggtaa

SEQ ID NO: 1633 - DNA, 30 bp, Artificial Sequence
  Synthetic construct
cttcgaaatcgccaggcagttcgggggaaa

SEQ ID NO: 1634 - DNA, 30 bp, Artificial Sequence
  Synthetic construct
catctccaggatcagttcaaaccgtggcca

SEQ ID NO: 1635 - DNA, 30 bp, Artificial Sequence
  Synthetic construct
acacacagctcaagcgcttcatccaggtgc

SEQ ID NO: 1636 - DNA, 30 bp, Artificial Sequence
  Synthetic construct
gcataggctccccggacatctgggaggacg

SEQ ID NO: 1637 - DNA, 30 bp, Artificial Sequence
  Synthetic construct
attccactaacccccgagactcagcgggac

SEQ ID NO: 1638 - DNA, 30 bp, Artificial Sequence
  Synthetic construct
gagacgcatgcagagcatcaacgcgggatt

SEQ ID NO: 1639 - DNA, 30 bp, Artificial Sequence; identical to SEQ ID NO: 409
  Synthetic construct

SEQ ID NO: 1640 - DNA, 30 bp, Artificial Sequence; identical to SEQ ID NO: 410
  Synthetic construct

SEQ ID NO: 1641 - DNA, 30 bp, Artificial Sequence; identical to SEQ ID NO: 411
  Synthetic construct

SEQ ID NO: 1642 - DNA, 30 bp, Artificial Sequence; identical to SEQ ID NO: 412
  Synthetic construct

SEQ ID NO: 1643 - DNA, 30 bp, Artificial Sequence; identical to SEQ ID NO: 1165
  Synthetic construct

SEQ ID NO: 1644 - DNA, 30 bp, Artificial Sequence; identical to SEQ ID NO: 1166
  Synthetic construct

SEQ ID NO: 1645 - DNA, 30 bp, Artificial Sequence; identical to SEQ ID NO: 1167
  Synthetic construct

SEQ ID NO: 1646 - DNA, 30 bp, Artificial Sequence; identical to SEQ ID NO: 1168
  Synthetic construct

SEQ ID NO: 1647 - DNA, 30 bp, Artificial Sequence
  Synthetic construct
atataaagctccacatataaatggtggcat

SEQ ID NO: 1648 - DNA, 30 bp, Artificial Sequence
  Synthetic construct
tgttacaaagcagctcatgagccacggtaa

SEQ ID NO: 1649 - DNA, 30 bp, Artificial Sequence
  Synthetic construct
aaagcaacattaaagcctggacactggtat

SEQ ID NO: 1650 - DNA, 30 bp, Artificial Sequence
  Synthetic construct
tggatgaaggcaattgtgtcatcggggaca

SEQ ID NO: 1651 - DNA, 30 bp, Artificial Sequence
  Synthetic construct
agaaacagaacgcggctctacgcaaggaga

SEQ ID NO: 1652 - DNA, 30 bp, Artificial Sequence
  Synthetic construct
aaggaggactctacctgtttgccaggggga

SEQ ID NO: 1653 - DNA, 30 bp, Artificial Sequence
  Synthetic construct
gatgatgtgagaagagttcagaggagggag

SEQ ID NO: 1654 - DNA, 30 bp, Artificial Sequence
  Synthetic construct
gcaaggagatcaagcagctcacagaggaac

SEQ ID NO: 1655 - DNA, 30 bp, Artificial Sequence; identical to SEQ ID NO: 1273
  Synthetic construct

SEQ ID NO: 1656 - DNA, 30 bp, Artificial Sequence; identical to SEQ ID NO: 1274
  Synthetic construct

SEQ ID NO: 1657 - DNA, 30 bp, Artificial Sequence; identical to SEQ ID NO: 1275
  Synthetic construct

SEQ ID NO: 1658 - DNA, 30 bp, Artificial Sequence; identical to SEQ ID NO: 1276
  Synthetic construct

SEQ ID NO: 1659 - DNA, 30 bp, Artificial Sequence; identical to SEQ ID NO: 437
  Synthetic construct

SEQ ID NO: 1660 - DNA, 30 bp, Artificial Sequence; identical to SEQ ID NO: 438
  Synthetic construct

SEQ ID NO: 1661 - DNA, 30 bp, Artificial Sequence; identical to SEQ ID NO: 439
  Synthetic construct

SEQ ID NO: 1662 - DNA, 30 bp, Artificial Sequence; identical to SEQ ID NO: 440
  Synthetic construct

SEQ ID NO: 1663 - DNA, 30 bp, Artificial Sequence; identical to SEQ ID NO: 401
  Synthetic construct

SEQ ID NO: 1664 - DNA, 30 bp, Artificial Sequence; identical to SEQ ID NO: 402
  Synthetic construct

SEQ ID NO: 1665 - DNA, 30 bp, Artificial Sequence; identical to SEQ ID NO: 403
  Synthetic construct

SEQ ID NO: 1666 - DNA, 30 bp, Artificial Sequence; identical to SEQ ID NO: 404
  Synthetic construct

SEQ ID NO: 1667 - DNA, 30 bp, Artificial Sequence; identical to SEQ ID NO: 593
  Synthetic construct

SEQ ID NO: 1668 - DNA, 30 bp, Artificial Sequence; identical to SEQ ID NO: 594
  Synthetic construct

SEQ ID NO: 1669 - DNA, 30 bp, Artificial Sequence; identical to SEQ ID NO: 595
  Synthetic construct

SEQ ID NO: 1670 - DNA, 30 bp, Artificial Sequence; identical to SEQ ID NO: 596
  Synthetic construct

SEQ ID NO: 1671 - DNA, 30 bp, Artificial Sequence; identical to SEQ ID NO: 1241
  Synthetic construct

SEQ ID NO: 1672 - DNA, 30 bp, Artificial Sequence; identical to SEQ ID NO: 1242
  Synthetic construct

SEQ ID NO: 1673 - DNA, 30 bp, Artificial Sequence; identical to SEQ ID NO: 1243
  Synthetic construct

SEQ ID NO: 1674 - DNA, 30 bp, Artificial Sequence; identical to SEQ ID NO: 1244
  Synthetic construct

SEQ ID NO: 1675 - DNA, 30 bp, Artificial Sequence
  Synthetic construct
cacgaagtgatatgcactacagtgtggctg

SEQ ID NO: 1676 - DNA, 30 bp, Artificial Sequence
  Synthetic construct
gccccaagacatcatggcctatcggggtcg

SEQ ID NO: 1677 - DNA, 30 bp, Artificial Sequence
  Synthetic construct
gctccatctgcaggtacatagccgtggcca

SEQ ID NO: 1678 - DNA, 30 bp, Artificial Sequence
  Synthetic construct
cagatccctcacctgcaggccatgaggacc

SEQ ID NO: 1679 - DNA, 30 bp, Artificial Sequence
  Synthetic construct
atgcatcacggaagtctcgtcctgaggtca

SEQ ID NO: 1680 - DNA, 30 bp, Artificial Sequence
  Synthetic construct
agcagcatgtgcggtcgcacaccggggaaa

SEQ ID NO: 1681 - DNA, 30 bp, Artificial Sequence
  Synthetic construct
tggtggcagcttacggcgacacatgggtat

SEQ ID NO: 1682 - DNA, 30 bp, Artificial Sequence
  Synthetic construct
aaactggtctacgtgccctcgcagagggtc

SEQ ID NO: 1683 - DNA, 30 bp, Artificial Sequence
  Synthetic construct
cctgcaccagcacgagcgtatggtaggacc

SEQ ID NO: 1684 - DNA, 30 bp, Artificial Sequence
  Synthetic construct
gcacctatcccgcccccttctacgtggcag

SEQ ID NO: 1685 - DNA, 30 bp, Artificial Sequence
  Synthetic construct
cgtagctgggcgataaggcaccgggggctc

SEQ ID NO: 1686 - DNA, 30 bp, Artificial Sequence
  Synthetic construct
agaagttattgcttgagtgatccggggagt

SEQ ID NO: 1687 - DNA, 30 bp, Artificial Sequence; identical to SEQ ID NO: 1169
  Synthetic construct

SEQ ID NO: 1688 - DNA, 30 bp, Artificial Sequence; identical to SEQ ID NO: 1170
  Synthetic construct

SEQ ID NO: 1689 - DNA, 30 bp, Artificial Sequence; identical to SEQ ID NO: 1171
  Synthetic construct

SEQ ID NO: 1690 - DNA, 30 bp, Artificial Sequence; identical to SEQ ID NO: 1172
  Synthetic construct

SEQ ID NO: 1691 - DNA, 30 bp, Artificial Sequence
  Synthetic construct
gccgccttactctctccatgtcagtggccg

SEQ ID NO: 1692 - DNA, 30 bp, Artificial Sequence
  Synthetic construct
cacggaactcgatgagcccctgcgcgggca

SEQ ID NO: 1693 - DNA, 30 bp, Artificial Sequence
  Synthetic construct
ccaagctcatcgacgactacggagtggagg

SEQ ID NO: 1694 - DNA, 30 bp, Artificial Sequence
  Synthetic construct
cgcatccgccagacggtcaaccgggggcct

SEQ ID NO: 1695 - DNA, 20 bp, Artificial Sequence
  Synthetic construct
cgatccaaatttgaacgccg

SEQ ID NO: 1696 - DNA, 20 bp, Artificial Sequence
  Synthetic construct
gagcaaactgcgttatacag

SEQ ID NO: 1697 - DNA, 20 bp, Artificial Sequence
  Synthetic construct
ttaccccagaaccagacgga

SEQ ID NO: 1698 - DNA, 20 bp, Artificial Sequence
  Synthetic construct
tttgtgcagttatgccagca

SEQ ID NO: 1699 - DNA, 20 bp, Artificial Sequence
  Synthetic construct
agcattatccaaagagtccg

SEQ ID NO: 1700 - DNA, 20 bp, Artificial Sequence
  Synthetic construct
ggaaacttgctgaacacccg

SEQ ID NO: 1701 - DNA, 20 bp, Artificial Sequence
  Synthetic construct
tccaaatggtaacgttcatg

SEQ ID NO: 1702 - DNA, 20 bp, Artificial Sequence
  Synthetic construct
tgtggattacttatataaca

SEQ ID NO: 1703 - DNA, 20 bp, Artificial Sequence
  Synthetic construct
ccagtcgacacccatcattg

SEQ ID NO: 1704 - DNA, 20 bp, Artificial Sequence
  Synthetic construct
ccccagtaaacgctccacag

SEQ ID NO: 1705 - DNA, 20 bp, Artificial Sequence
  Synthetic construct
gaacgtcaccttagaatccg

SEQ ID NO: 1706 - DNA, 20 bp, Artificial Sequence
  Synthetic construct
tctttgtctgccacaaacgt

SEQ ID NO: 1707 - DNA, 20 bp, Artificial Sequence
  Synthetic construct
ccattgttcaatatcgtccg

SEQ ID NO: 1708 - DNA, 20 bp, Artificial Sequence
  Synthetic construct
gagcgctgctcagatagcga

SEQ ID NO: 1709 - DNA, 20 bp, Artificial Sequence
  Synthetic construct
gatccactcacagtttccat

SEQ ID NO: 1710 - DNA, 20 bp, Artificial Sequence
  Synthetic construct
ggtgccctatgagccgcctg

SEQ ID NO: 1711 - DNA, 20 bp, Artificial Sequence
  Synthetic construct
aggatgcggatatgactctg

SEQ ID NO: 1712 - DNA, 20 bp, Artificial Sequence
  Synthetic construct
ggacgcgttcaagtaagcgt

SEQ ID NO: 1713 - DNA, 20 bp, Artificial Sequence
  Synthetic construct
ggggagcgagtgatgtacgt

SEQ ID NO: 1714 - DNA, 20 bp, Artificial Sequence
  Synthetic construct
tttggacagatctattccag

SEQ ID NO: 1715 - DNA, 20 bp, Artificial Sequence
  Synthetic construct
agagtgcatcgacccctcgg

SEQ ID NO: 1716 - DNA, 20 bp, Artificial Sequence
  Synthetic construct
ctgcggggaggactccgtcg

SEQ ID NO: 1717 - DNA, 20 bp, Artificial Sequence
  Synthetic construct
cttcggggagacaacgacgg

SEQ ID NO: 1718 - DNA, 20 bp, Artificial Sequence
  Synthetic construct
gctgcaccgagtcgtagtcg

SEQ ID NO: 1719 - DNA, 20 bp, Artificial Sequence
  Synthetic construct
gagaacctcggaacatacgg

SEQ ID NO: 1720 - DNA, 20 bp, Artificial Sequence
  Synthetic construct
gcagatcgagtcctacccca

SEQ ID NO: 1721 - DNA, 20 bp, Artificial Sequence
  Synthetic construct
tcttcttgtctcggcccatg

SEQ ID NO: 1722 - DNA, 20 bp, Artificial Sequence
  Synthetic construct
tgagaacgcatctcagcccg

SEQ ID NO: 1723 - DNA, 20 bp, Artificial Sequence
  Synthetic construct
gaactccctgccagatatcg

SEQ ID NO: 1724 - DNA, 20 bp, Artificial Sequence
  Synthetic construct
tctaggccgatacaaagcag

SEQ ID NO: 1725 - DNA, 20 bp, Artificial Sequence
  Synthetic construct
tctccctcgacagtcatgtg

SEQ ID NO: 1726 - DNA, 20 bp, Artificial Sequence
  Synthetic construct
ttaattccaaccaaatcccg

SEQ ID NO: 1727 - DNA, 20 bp, Artificial Sequence
  Synthetic construct
acctgatcccaaaacatgga

SEQ ID NO: 1728 - DNA, 20 bp, Artificial Sequence
  Synthetic construct
cagcattcggtagaccctga

SEQ ID NO: 1729 - DNA, 20 bp, Artificial Sequence
  Synthetic construct
ggatgcatgcggctagacat

SEQ ID NO: 1730 - DNA, 20 bp, Artificial Sequence
  Synthetic construct
tacctgcataggaagacacg

SEQ ID NO: 1731 - DNA, 20 bp, Artificial Sequence
  Synthetic construct
ccacttgttaacagagaccg

SEQ ID NO: 1732 - DNA, 20 bp, Artificial Sequence
  Synthetic construct
cttgtggcgctgaaaacgaa

SEQ ID NO: 1733 - DNA, 20 bp, Artificial Sequence
  Synthetic construct
tatgccatgagtgctcagag

SEQ ID NO: 1734 - DNA, 20 bp, Artificial Sequence
  Synthetic construct
tgagagactccagttgccag

SEQ ID NO: 1735 - DNA, 20 bp, Artificial Sequence
  Synthetic construct
ccctggatagaatacatcgt

SEQ ID NO: 1736 - DNA, 20 bp, Artificial Sequence
  Synthetic construct
gacaagatgtcagacctagg

SEQ ID NO: 1737 - DNA, 20 bp, Artificial Sequence
  Synthetic construct
gaggtggaaggtaaacacaa

SEQ ID NO: 1738 - DNA, 20 bp, Artificial Sequence
  Synthetic construct
ttctaggataaccaccactg

SEQ ID NO: 1739 - DNA, 20 bp, Artificial Sequence
  Synthetic construct
acatcgactgctggacaatg

SEQ ID NO: 1740 - DNA, 20 bp, Artificial Sequence
  Synthetic construct
cagtgagtagtgccaaacca

SEQ ID NO: 1741 - DNA, 20 bp, Artificial Sequence
  Synthetic construct
gtggcgtactgcacgtgtcg

SEQ ID NO: 1742 - DNA, 20 bp, Artificial Sequence
  Synthetic construct
ttcacattatgaccaacacc

SEQ ID NO: 1743 - DNA, 30 bp, Artificial Sequence; identical to SEQ ID NO: 1381
  Synthetic construct

SEQ ID NO: 1744 - DNA, 30 bp, Artificial Sequence; identical to SEQ ID NO: 1382
  Synthetic construct

SEQ ID NO: 1745 - DNA, 30 bp, Artificial Sequence; identical to SEQ ID NO: 1383
  Synthetic construct

SEQ ID NO: 1746 - DNA, 30 bp, Artificial Sequence; identical to SEQ ID NO: 1384
  Synthetic construct

SEQ ID NO: 1747 - DNA, 30 bp, Artificial Sequence; identical to SEQ ID NO: 1385
  Synthetic construct

SEQ ID NO: 1748 - DNA, 30 bp, Artificial Sequence; identical to SEQ ID NO: 1386
  Synthetic construct

SEQ ID NO: 1749 - DNA, 30 bp, Artificial Sequence; identical to SEQ ID NO: 1387
  Synthetic construct

SEQ ID NO: 1750 - DNA, 30 bp, Artificial Sequence; identical to SEQ ID NO: 1388
  Synthetic construct

SEQ ID NO: 1751 - DNA, 30 bp, Artificial Sequence; identical to SEQ ID NO: 1389
  Synthetic construct

SEQ ID NO: 1752 - DNA, 30 bp, Artificial Sequence; identical to SEQ ID NO: 1390
  Synthetic construct

SEQ ID NO: 1753 - DNA, 30 bp, Artificial Sequence; identical to SEQ ID NO: 1391
  Synthetic construct

SEQ ID NO: 1754 - DNA, 30 bp, Artificial Sequence; identical to SEQ ID NO: 1392
  Synthetic construct

SEQ ID NO: 1755 - DNA, 30 bp, Artificial Sequence; identical to SEQ ID NO: 585
  Synthetic construct

SEQ ID NO: 1756 - DNA, 30 bp, Artificial Sequence; identical to SEQ ID NO: 586
  Synthetic construct

SEQ ID NO: 1757 - DNA, 30 bp, Artificial Sequence; identical to SEQ ID NO: 587
  Synthetic construct

SEQ ID NO: 1758 - DNA, 30 bp, Artificial Sequence; identical to SEQ ID NO: 588
  Synthetic construct

SEQ ID NO: 1759 - DNA, 30 bp, Artificial Sequence; identical to SEQ ID NO: 893
  Synthetic construct

SEQ ID NO: 1760 - DNA, 30 bp, Artificial Sequence; identical to SEQ ID NO: 894
  Synthetic construct

SEQ ID NO: 1761 - DNA, 30 bp, Artificial Sequence; identical to SEQ ID NO: 895
  Synthetic construct

SEQ ID NO: 1762 - DNA, 30 bp, Artificial Sequence; identical to SEQ ID NO: 896
  Synthetic construct

SEQ ID NO: 1763 - DNA, 30 bp, Artificial Sequence; identical to SEQ ID NO: 1417
  Synthetic construct

SEQ ID NO: 1764 - DNA, 30 bp, Artificial Sequence; identical to SEQ ID NO: 1418
  Synthetic construct

SEQ ID NO: 1765 - DNA, 30 bp, Artificial Sequence; identical to SEQ ID NO: 1419
  Synthetic construct

SEQ ID NO: 1766 - DNA, 30 bp, Artificial Sequence; identical to SEQ ID NO: 1420
  Synthetic construct

SEQ ID NO: 1767 - DNA, 30 bp, Artificial Sequence; identical to SEQ ID NO: 597
  Synthetic construct

SEQ ID NO: 1768 - DNA, 30 bp, Artificial Sequence; identical to SEQ ID NO: 598
  Synthetic construct

SEQ ID NO: 1769 - DNA, 30 bp, Artificial Sequence; identical to SEQ ID NO: 599
  Synthetic construct

SEQ ID NO: 1770 - DNA, 30 bp, Artificial Sequence; identical to SEQ ID NO: 600
  Synthetic construct

SEQ ID NO: 1771 - DNA, 30 bp, Artificial Sequence; identical to SEQ ID NO: 417
  Synthetic construct

SEQ ID NO: 1772 - DNA, 30 bp, Artificial Sequence; identical to SEQ ID NO: 418
  Synthetic construct

SEQ ID NO: 1773 - DNA, 30 bp, Artificial Sequence; identical to SEQ ID NO: 419
  Synthetic construct

SEQ ID NO: 1774 - DNA, 30 bp, Artificial Sequence; identical to SEQ ID NO: 420
  Synthetic construct

SEQ ID NO: 1775 - DNA, 30 bp, Artificial Sequence; identical to SEQ ID NO: 1213
  Synthetic construct

SEQ ID NO: 1776 - DNA, 30 bp, Artificial Sequence; identical to SEQ ID NO: 1214
  Synthetic construct

SEQ ID NO: 1777 - DNA, 30 bp, Artificial Sequence; identical to SEQ ID NO: 1215
  Synthetic construct

SEQ ID NO: 1778 - DNA, 30 bp, Artificial Sequence; identical to SEQ ID NO: 1216
  Synthetic construct

SEQ ID NO: 1779 - DNA, 30 bp, Artificial Sequence; identical to SEQ ID NO: 1449
  Synthetic construct

SEQ ID NO: 1780 - DNA, 30 bp, Artificial Sequence; identical to SEQ ID NO: 1450
  Synthetic construct

SEQ ID NO: 1781 - DNA, 30 bp, Artificial Sequence; identical to SEQ ID NO: 1451
  Synthetic construct

SEQ ID NO: 1782 - DNA, 30 bp, Artificial Sequence; identical to SEQ ID NO: 1452
  Synthetic construct

SEQ ID NO: 1783 - DNA, 30 bp, Artificial Sequence; identical to SEQ ID NO: 1465
  Synthetic construct

SEQ ID NO: 1784 - DNA, 30 bp, Artificial Sequence; identical to SEQ ID NO: 1466
  Synthetic construct

SEQ ID NO: 1785 - DNA, 30 bp, Artificial Sequence; identical to SEQ ID NO: 1467
  Synthetic construct

SEQ ID NO: 1786 - DNA, 30 bp, Artificial Sequence; identical to SEQ ID NO: 1468
  Synthetic construct

SEQ ID NO: 1787 - DNA, 30 bp, Artificial Sequence; identical to SEQ ID NO: 397
  Synthetic construct

SEQ ID NO: 1788 - DNA, 30 bp, Artificial Sequence; identical to SEQ ID NO: 398
  Synthetic construct

SEQ ID NO: 1789 - DNA, 30 bp, Artificial Sequence; identical to SEQ ID NO: 399
  Synthetic construct

SEQ ID NO: 1790 - DNA, 30 bp, Artificial Sequence; identical to SEQ ID NO: 400
  Synthetic construct

SEQ ID NO: 1791 - DNA, 20 bp, Artificial Sequence
  Synthetic construct
aggtaccctccgacccacca

SEQ ID NO: 1792 - DNA, 20 bp, Artificial Sequence
  Synthetic construct
cagggagtgtgtgaactgtg

SEQ ID NO: 1793 - DNA, 20 bp, Artificial Sequence
  Synthetic construct
ggagctgtactcgggcacgt

SEQ ID NO: 1794 - DNA, 20 bp, Artificial Sequence
  Synthetic construct
tccaagacgtccatccacca

SEQ ID NO: 1795 - DNA, 20 bp, Artificial Sequence
  Synthetic construct
aagatcagtagcggtcccgg

SEQ ID NO: 1796 - DNA, 20 bp, Artificial Sequence
  Synthetic construct
agaaaggacgtcgatcgagg

SEQ ID NO: 1797 - DNA, 20 bp, Artificial Sequence
  Synthetic construct
aggggtcttaatgatccgcg

SEQ ID NO: 1798 - DNA, 20 bp, Artificial Sequence
  Synthetic construct
ttgaccataattatgctcag

SEQ ID NO: 1799 - DNA, 20 bp, Artificial Sequence
  Synthetic construct
cttactaatgaagtaatccg

SEQ ID NO: 1800 - DNA, 20 bp, Artificial Sequence
  Synthetic construct
gagaaagcagtctttaccca

SEQ ID NO: 1801 - DNA, 20 bp, Artificial Sequence
  Synthetic construct
ggtctcggagaatgaccgag

SEQ ID NO: 1802 - DNA, 20 bp, Artificial Sequence
  Synthetic construct
tgcatggggaggaccagtcg

SEQ ID NO: 1803 - DNA, 20 bp, Artificial Sequence
  Synthetic construct
aaagaacaaatggaacgcga

SEQ ID NO: 1804 - DNA, 20 bp, Artificial Sequence
  Synthetic construct
cacctagtaagtcgtttagg

SEQ ID NO: 1805 - DNA, 20 bp, Artificial Sequence
  Synthetic construct
catgccagttcacagcagtg

SEQ ID NO: 1806 - DNA, 20 bp, Artificial Sequence
  Synthetic construct
cattgcctcaggaacaaagg

SEQ ID NO: 1807 - DNA, 20 bp, Artificial Sequence
  Synthetic construct
acggctatgtgcaatctgcg

SEQ ID NO: 1808 - DNA, 20 bp, Artificial Sequence
  Synthetic construct
gccctggctggatcccgcag

SEQ ID NO: 1809 - DNA, 20 bp, Artificial Sequence
  Synthetic construct
ggacaacaaagactgcacag

SEQ ID NO: 1810 - DNA, 20 bp, Artificial Sequence
  Synthetic construct
gtggcttcacatcttcaggg

SEQ ID NO: 1811 - DNA, 20 bp, Artificial Sequence
  Synthetic construct
agatcgaagtatgcctcacc

SEQ ID NO: 1812 - DNA, 20 bp, Artificial Sequence
  Synthetic construct
agtgcatactgtagtccttg

SEQ ID NO: 1813 - DNA, 20 bp, Artificial Sequence
  Synthetic construct
gagcccccaactgacgaatg

SEQ ID NO: 1814 - DNA, 20 bp, Artificial Sequence
  Synthetic construct
taattagtactactatgcac

SEQ ID NO: 1815 - DNA, 20 bp, Artificial Sequence
  Synthetic construct
caatgaacgagcaacagcaa

SEQ ID NO: 1816 - DNA, 20 bp, Artificial Sequence
  Synthetic construct
ccgtacactcagcatgaccc

SEQ ID NO: 1817 - DNA, 20 bp, Artificial Sequence
  Synthetic construct
gaaatcgccaggcagttcgg

SEQ ID NO: 1818 - DNA, 20 bp, Artificial Sequence
  Synthetic construct
tccaggatcagttcaaaccg

SEQ ID NO: 1819 - DNA, 20 bp, Artificial Sequence
  Synthetic construct
acagctcaagcgcttcatcc

SEQ ID NO: 1820 - DNA, 20 bp, Artificial Sequence
  Synthetic construct
aggctccccggacatctggg

SEQ ID NO: 1821 - DNA, 20 bp, Artificial Sequence
  Synthetic construct
cactaacccccgagactcag

SEQ ID NO: 1822 - DNA, 20 bp, Artificial Sequence
  Synthetic construct
cgcatgcagagcatcaacgc

SEQ ID NO: 1823 - DNA, 20 bp, Artificial Sequence
  Synthetic construct
aagatgaactgcgatgtgtg

SEQ ID NO: 1824 - DNA, 20 bp, Artificial Sequence
  Synthetic construct
caagcagagaagttcccttg

SEQ ID NO: 1825 - DNA, 20 bp, Artificial Sequence
  Synthetic construct
gctcatacagacccgcatga

SEQ ID NO: 1826 - DNA, 20 bp, Artificial Sequence
  Synthetic construct
ggacagattagcaagcaatg

SEQ ID NO: 1827 - DNA, 20 bp, Artificial Sequence
  Synthetic construct
aggttggtgactgtgaacgc

SEQ ID NO: 1828 - DNA, 20 bp, Artificial Sequence
  Synthetic construct
agttcatcgacaacaagctg

SEQ ID NO: 1829 - DNA, 20 bp, Artificial Sequence
  Synthetic construct
gggctgacactagcagacac

SEQ ID NO: 1830 - DNA, 20 bp, Artificial Sequence
  Synthetic construct
tctgttgtggggtctgaacg

SEQ ID NO: 1831 - DNA, 20 bp, Artificial Sequence
  Synthetic construct
aaagctccacatataaatgg

SEQ ID NO: 1832 - DNA, 20 bp, Artificial Sequence
  Synthetic construct
acaaagcagctcatgagcca

SEQ ID NO: 1833 - DNA, 20 bp, Artificial Sequence
  Synthetic construct
caacattaaagcctggacac

SEQ ID NO: 1834 - DNA, 20 bp, Artificial Sequence
  Synthetic construct
tgaaggcaattgtgtcatcg

SEQ ID NO: 1835 - DNA, 20 bp, Artificial Sequence
  Synthetic construct
acagaacgcggctctacgca

SEQ ID NO: 1836 - DNA, 20 bp, Artificial Sequence
  Synthetic construct
aggactctacctgtttgcca

SEQ ID NO: 1837 - DNA, 20 bp, Artificial Sequence
  Synthetic construct
atgtgagaagagttcagagg

SEQ ID NO: 1838 - DNA, 20 bp, Artificial Sequence
  Synthetic construct
ggagatcaagcagctcacag

SEQ ID NO: 1839 - DNA, 20 bp, Artificial Sequence
  Synthetic construct
actgtcactaacctactggt

SEQ ID NO: 1840 - DNA, 20 bp, Artificial Sequence
  Synthetic construct
cccgcccgctgactgcacat

SEQ ID NO: 1841 - DNA, 20 bp, Artificial Sequence
  Synthetic construct
ctctaccgcccggaaaacgt

SEQ ID NO: 1842 - DNA, 20 bp, Artificial Sequence
  Synthetic construct
ttgggccagagtacgatgca

SEQ ID NO: 1843 - DNA, 20 bp, Artificial Sequence
  Synthetic construct
gaaaatgaatggctcccaca

SEQ ID NO: 1844 - DNA, 20 bp, Artificial Sequence
  Synthetic construct
gatggcttggtccatcacgt

SEQ ID NO: 1845 - DNA, 20 bp, Artificial Sequence
  Synthetic construct
ggggcctcattcacccagaa

SEQ ID NO: 1846 - DNA, 20 bp, Artificial Sequence
  Synthetic construct
tccaagagtgacagagtcgt

SEQ ID NO: 1847 - DNA, 20 bp, Artificial Sequence
  Synthetic construct
cagacccgtacaaagtgtac

SEQ ID NO: 1848 - DNA, 20 bp, Artificial Sequence
  Synthetic construct
cccatgacgtttggaccccg

SEQ ID NO: 1849 - DNA, 20 bp, Artificial Sequence
  Synthetic construct
ctaccgggaaatcctcgtga

SEQ ID NO: 1850 - DNA, 20 bp, Artificial Sequence
  Synthetic construct
ctgatcgaccagatcgacag

SEQ ID NO: 1851 - DNA, 20 bp, Artificial Sequence
  Synthetic construct
agccggtccctttcccgtcg

SEQ ID NO: 1852 - DNA, 20 bp, Artificial Sequence
  Synthetic construct
cctcagttggcaaggtacct

SEQ ID NO: 1853 - DNA, 20 bp, Artificial Sequence
  Synthetic construct
cctctcaatcaaaataaggt

SEQ ID NO: 1854 - DNA, 20 bp, Artificial Sequence
  Synthetic construct
cgaaaatctgggctaagtgc

SEQ ID NO: 1855 - DNA, 20 bp, Artificial Sequence
  Synthetic construct
actctccaggcttaacacag

SEQ ID NO: 1856 - DNA, 20 bp, Artificial Sequence
  Synthetic construct
agctctcgaagactgctgtg

SEQ ID NO: 1857 - DNA, 20 bp, Artificial Sequence
  Synthetic construct
gtgtacaaattcctgcacca

SEQ ID NO: 1858 - DNA, 20 bp, Artificial Sequence
  Synthetic construct
tgacgcggaggcgtattcgg

SEQ ID NO: 1859 - DNA, 20 bp, Artificial Sequence
  Synthetic construct
aagtgatatgcactacagtg

SEQ ID NO: 1860 - DNA, 20 bp, Artificial Sequence
  Synthetic construct
caagacatcatggcctatcg

SEQ ID NO: 1861 - DNA, 20 bp, Artificial Sequence
  Synthetic construct
catctgcaggtacatagccg

SEQ ID NO: 1862 - DNA, 20 bp, Artificial Sequence
  Synthetic construct
tccctcacctgcaggccatg

SEQ ID NO: 1863 - DNA, 20 bp, Artificial Sequence
  Synthetic construct
atcacggaagtctcgtcctg

SEQ ID NO: 1864 - DNA, 20 bp, Artificial Sequence
  Synthetic construct
gcatgtgcggtcgcacaccg

SEQ ID NO: 1865 - DNA, 20 bp, Artificial Sequence
  Synthetic construct
ggcagcttacggcgacacat

SEQ ID NO: 1866 - DNA, 20 bp, Artificial Sequence
  Synthetic construct
tggtctacgtgccctcgcag

SEQ ID NO: 1867 - DNA, 20 bp, Artificial Sequence
  Synthetic construct
caccagcacgagcgtatggt

SEQ ID NO: 1868 - DNA, 20 bp, Artificial Sequence
  Synthetic construct
ctatcccgcccccttctacg

SEQ ID NO: 1869 - DNA, 20 bp, Artificial Sequence
  Synthetic construct
gctgggcgataaggcaccgg

SEQ ID NO: 1870 - DNA, 20 bp, Artificial Sequence
  Synthetic construct
gttattgcttgagtgatccg

SEQ ID NO: 1871 - DNA, 20 bp, Artificial Sequence
  Synthetic construct
agatattgaccatgagacag

SEQ ID NO: 1872 - DNA, 20 bp, Artificial Sequence
  Synthetic construct
ggagaccatcgagaccacag

SEQ ID NO: 1873 - DNA, 20 bp, Artificial Sequence
  Synthetic construct
ggtcaccgacgacccgaccc

SEQ ID NO: 1874 - DNA, 20 bp, Artificial Sequence
  Synthetic construct
tgaacaaacgctggtcaccg

SEQ ID NO: 1875 - DNA, 20 bp, Artificial Sequence
  Synthetic construct
ccttactctctccatgtcag

SEQ ID NO: 1876 - DNA, 20 bp, Artificial Sequence
  Synthetic construct
gaactcgatgagcccctgcg

SEQ ID NO: 1877 - DNA, 20 bp, Artificial Sequence
  Synthetic construct
gctcatcgacgactacggag

SEQ ID NO: 1878 - DNA, 20 bp, Artificial Sequence
  Synthetic construct
tccgccagacggtcaaccgg

SEQ ID NO: 1879 - DNA, 30 bp, Artificial Sequence; identical to SEQ ID NO: 697
  Synthetic construct

SEQ ID NO: 1880 - DNA, 30 bp, Artificial Sequence; identical to SEQ ID NO: 698
  Synthetic construct

SEQ ID NO: 1881 - DNA, 30 bp, Artificial Sequence; identical to SEQ ID NO: 699
  Synthetic construct

SEQ ID NO: 1882 - DNA, 30 bp, Artificial Sequence; identical to SEQ ID NO: 700
  Synthetic construct

SEQ ID NO: 1883 - DNA, 30 bp, Artificial Sequence; identical to SEQ ID NO: 405
  Synthetic construct

SEQ ID NO: 1884 - DNA, 30 bp, Artificial Sequence; identical to SEQ ID NO: 406
  Synthetic construct

SEQ ID NO: 1885 - DNA, 30 bp, Artificial Sequence; identical to SEQ ID NO: 407
  Synthetic construct

SEQ ID NO: 1886 - DNA, 30 bp, Artificial Sequence; identical to SEQ ID NO: 408
  Synthetic construct

SEQ ID NO: 1887 - DNA, 30 bp, Artificial Sequence; identical to SEQ ID NO: 601
  Synthetic construct

SEQ ID NO: 1888 - DNA, 30 bp, Artificial Sequence; identical to SEQ ID NO: 602
  Synthetic construct

SEQ ID NO: 1889 - DNA, 30 bp, Artificial Sequence; identical to SEQ ID NO: 603
  Synthetic construct

SEQ ID NO: 1890 - DNA, 30 bp, Artificial Sequence; identical to SEQ ID NO: 604
  Synthetic construct

SEQ ID NO: 1891 - DNA, 30 bp, Artificial Sequence; identical to SEQ ID NO: 1249
  Synthetic construct

SEQ ID NO: 1892 - DNA, 30 bp, Artificial Sequence; identical to SEQ ID NO: 1250
  Synthetic construct

SEQ ID NO: 1893 - DNA, 30 bp, Artificial Sequence; identical to SEQ ID NO: 1251
  Synthetic construct

SEQ ID NO: 1894 - DNA, 30 bp, Artificial Sequence; identical to SEQ ID NO: 1252
  Synthetic construct

SEQ ID NO: 1895 - DNA, 30 bp, Artificial Sequence; identical to SEQ ID NO: 1623
  Synthetic construct

SEQ ID NO: 1896 - DNA, 30 bp, Artificial Sequence; identical to SEQ ID NO: 1624
  Synthetic construct

SEQ ID NO: 1897 - DNA, 30 bp, Artificial Sequence; identical to SEQ ID NO: 1625
  Synthetic construct

SEQ ID NO: 1898 - DNA, 30 bp, Artificial Sequence; identical to SEQ ID NO: 1626
  Synthetic construct

SEQ ID NO: 1899 - DNA, 30 bp, Artificial Sequence; identical to SEQ ID NO: 1627
  Synthetic construct

SEQ ID NO: 1900 - DNA, 30 bp, Artificial Sequence; identical to SEQ ID NO: 1628
  Synthetic construct

SEQ ID NO: 1901 - DNA, 30 bp, Artificial Sequence; identical to SEQ ID NO: 1629
  Synthetic construct

SEQ ID NO: 1902 - DNA, 30 bp, Artificial Sequence; identical to SEQ ID NO: 1630
  Synthetic construct

SEQ ID NO: 1903 - DNA, 30 bp, Artificial Sequence; identical to SEQ ID NO: 1631
  Synthetic construct

SEQ ID NO: 1904 - DNA, 30 bp, Artificial Sequence; identical to SEQ ID NO: 1632
  Synthetic construct

SEQ ID NO: 1905 - DNA, 30 bp, Artificial Sequence; identical to SEQ ID NO: 1633
  Synthetic construct

SEQ ID NO: 1906 - DNA, 30 bp, Artificial Sequence; identical to SEQ ID NO: 1634
  Synthetic construct

SEQ ID NO: 1907 - DNA, 30 bp, Artificial Sequence; identical to SEQ ID NO: 1635
  Synthetic construct

SEQ ID NO: 1908 - DNA, 30 bp, Artificial Sequence; identical to SEQ ID NO: 1636
  Synthetic construct

SEQ ID NO: 1909 - DNA, 30 bp, Artificial Sequence; identical to SEQ ID NO: 1637
  Synthetic construct

SEQ ID NO: 1910 - DNA, 30 bp, Artificial Sequence; identical to SEQ ID NO: 1638
  Synthetic construct

SEQ ID NO: 1911 - DNA, 30 bp, Artificial Sequence; identical to SEQ ID NO: 409
  Synthetic construct

SEQ ID NO: 1912 - DNA, 30 bp, Artificial Sequence; identical to SEQ ID NO: 410
  Synthetic construct

SEQ ID NO: 1913 - DNA, 30 bp, Artificial Sequence; identical to SEQ ID NO: 411
  Synthetic construct

SEQ ID NO: 1914 - DNA, 30 bp, Artificial Sequence; identical to SEQ ID NO: 412
  Synthetic construct

SEQ ID NO: 1915 - DNA, 30 bp, Artificial Sequence; identical to SEQ ID NO: 1165
  Synthetic construct

SEQ ID NO: 1916 - DNA, 30 bp, Artificial Sequence; identical to SEQ ID NO: 1166
  Synthetic construct

SEQ ID NO: 1917 - DNA, 30 bp, Artificial Sequence; identical to SEQ ID NO: 1167
  Synthetic construct

SEQ ID NO: 1918 - DNA, 30 bp, Artificial Sequence; identical to SEQ ID NO: 1168
  Synthetic construct

SEQ ID NO: 1919 - DNA, 30 bp, Artificial Sequence; identical to SEQ ID NO: 1647
  Synthetic construct

SEQ ID NO: 1920 - DNA, 30 bp, Artificial Sequence; identical to SEQ ID NO: 1648
  Synthetic construct

SEQ ID NO: 1921 - DNA, 30 bp, Artificial Sequence; identical to SEQ ID NO: 1649
  Synthetic construct

SEQ ID NO: 1922 - DNA, 30 bp, Artificial Sequence; identical to SEQ ID NO: 1650
  Synthetic construct

SEQ ID NO: 1923 - DNA, 30 bp, Artificial Sequence; identical to SEQ ID NO: 1651
  Synthetic construct

SEQ ID NO: 1924 - DNA, 30 bp, Artificial Sequence; identical to SEQ ID NO: 1652
  Synthetic construct

SEQ ID NO: 1925 - DNA, 30 bp, Artificial Sequence; identical to SEQ ID NO: 1653
  Synthetic construct

SEQ ID NO: 1926 - DNA, 30 bp, Artificial Sequence; identical to SEQ ID NO: 1654
  Synthetic construct

SEQ ID NO: 1927 - DNA, 30 bp, Artificial Sequence; identical to SEQ ID NO: 1273
  Synthetic construct

SEQ ID NO: 1928 - DNA, 30 bp, Artificial Sequence; identical to SEQ ID NO: 1274
  Synthetic construct

SEQ ID NO: 1929 - DNA, 30 bp, Artificial Sequence; identical to SEQ ID NO: 1275
  Synthetic construct

SEQ ID NO: 1930 - DNA, 30 bp, Artificial Sequence; identical to SEQ ID NO: 1276
  Synthetic construct

SEQ ID NO: 1931 - DNA, 30 bp, Artificial Sequence; identical to SEQ ID NO: 437
  Synthetic construct

SEQ ID NO: 1932 - DNA, 30 bp, Artificial Sequence; identical to SEQ ID NO: 438
  Synthetic construct

SEQ ID NO: 1933 - DNA, 30 bp, Artificial Sequence; identical to SEQ ID NO: 439
  Synthetic construct

SEQ ID NO: 1934 - DNA, 30 bp, Artificial Sequence; identical to SEQ ID NO: 440
  Synthetic construct

SEQ ID NO: 1935 - DNA, 30 bp, Artificial Sequence; identical to SEQ ID NO: 401
  Synthetic construct

SEQ ID NO: 1936 - DNA, 30 bp, Artificial Sequence; identical to SEQ ID NO: 402
  Synthetic construct

SEQ ID NO: 1937 - DNA, 30 bp, Artificial Sequence; identical to SEQ ID NO: 403
  Synthetic construct

SEQ ID NO: 1938 - DNA, 30 bp, Artificial Sequence; identical to SEQ ID NO: 404
  Synthetic construct

SEQ ID NO: 1939 - DNA, 30 bp, Artificial Sequence; identical to SEQ ID NO: 593
  Synthetic construct

SEQ ID NO: 1940 - DNA, 30 bp, Artificial Sequence; identical to SEQ ID NO: 594
  Synthetic construct

SEQ ID NO: 1941 - DNA, 30 bp, Artificial Sequence; identical to SEQ ID NO: 595
  Synthetic construct

SEQ ID NO: 1942 - DNA, 30 bp, Artificial Sequence; identical to SEQ ID NO: 596
  Synthetic construct

SEQ ID NO: 1943 - DNA, 30 bp, Artificial Sequence; identical to SEQ ID NO: 1241
  Synthetic construct

SEQ ID NO: 1944 - DNA, 30 bp, Artificial Sequence; identical to SEQ ID NO: 1242
  Synthetic construct

SEQ ID NO: 1945 - DNA, 30 bp, Artificial Sequence; identical to SEQ ID NO: 1243
  Synthetic construct

SEQ ID NO: 1946 - DNA, 30 bp, Artificial Sequence; identical to SEQ ID NO: 1244
  Synthetic construct

SEQ ID NO: 1947 - DNA, 30 bp, Artificial Sequence; identical to SEQ ID NO: 1675
  Synthetic construct

SEQ ID NO: 1948 - DNA, 30 bp, Artificial Sequence; identical to SEQ ID NO: 1676
  Synthetic construct

SEQ ID NO: 1949 - DNA, 30 bp, Artificial Sequence; identical to SEQ ID NO: 1677
  Synthetic construct

SEQ ID NO: 1950 - DNA, 30 bp, Artificial Sequence; identical to SEQ ID NO: 1678
  Synthetic construct

SEQ ID NO: 1951 - DNA, 30 bp, Artificial Sequence; identical to SEQ ID NO: 1679
  Synthetic construct

SEQ ID NO: 1952 - DNA, 30 bp, Artificial Sequence; identical to SEQ ID NO: 1680
  Synthetic construct

SEQ ID NO: 1953 - DNA, 30 bp, Artificial Sequence; identical to SEQ ID NO: 1681
  Synthetic construct

SEQ ID NO: 1954 - DNA, 30 bp, Artificial Sequence; identical to SEQ ID NO: 1682
  Synthetic construct

SEQ ID NO: 1955 - DNA, 30 bp, Artificial Sequence; identical to SEQ ID NO: 1683
  Synthetic construct

SEQ ID NO: 1956 - DNA, 30 bp, Artificial Sequence; identical to SEQ ID NO: 1684
  Synthetic construct

SEQ ID NO: 1957 - DNA, 30 bp, Artificial Sequence; identical to SEQ ID NO: 1685
  Synthetic construct

SEQ ID NO: 1958 - DNA, 30 bp, Artificial Sequence; identical to SEQ ID NO: 1686
  Synthetic construct

SEQ ID NO: 1959 - DNA, 30 bp, Artificial Sequence; identical to SEQ ID NO: 1169
  Synthetic construct

SEQ ID NO: 1960 - DNA, 30 bp, Artificial Sequence; identical to SEQ ID NO: 1170
  Synthetic construct

SEQ ID NO: 1961 - DNA, 30 bp, Artificial Sequence; identical to SEQ ID NO: 1171
  Synthetic construct

SEQ ID NO: 1962 - DNA, 30 bp, Artificial Sequence; identical to SEQ ID NO: 1172
  Synthetic construct

SEQ ID NO: 1963 - DNA, 30 bp, Artificial Sequence; identical to SEQ ID NO: 1691
  Synthetic construct

SEQ ID NO: 1964 - DNA, 30 bp, Artificial Sequence; identical to SEQ ID NO: 1692
  Synthetic construct

SEQ ID NO: 1965 - DNA, 30 bp, Artificial Sequence; identical to SEQ ID NO: 1693
  Synthetic construct

SEQ ID NO: 1966 - DNA, 30 bp, Artificial Sequence; identical to SEQ ID NO: 1694
  Synthetic construct

SEQ ID NO: 1967 - DNA, 20 bp, Artificial Sequence
  Synthetic construct
aagtgttgtttgatcagtca

SEQ ID NO: 1968 - DNA, 20 bp, Artificial Sequence
  Synthetic construct
acatactctaagtcaggcag

SEQ ID NO: 1969 - DNA, 20 bp, Artificial Sequence
  Synthetic construct
gtgtaatttagagagcagcg

SEQ ID NO: 1970 - DNA, 20 bp, Artificial Sequence
  Synthetic construct
tctgttcagactctaatagg

SEQ ID NO: 1971 - DNA, 20 bp, Artificial Sequence
  Synthetic construct
acttcggcaagactttgagg

SEQ ID NO: 1972 - DNA, 20 bp, Artificial Sequence
  Synthetic construct
gcatcgcaccatgtctcagg

SEQ ID NO: 1973 - DNA, 20 bp, Artificial Sequence
  Synthetic construct
ggagggcactaccactacgc

SEQ ID NO: 1974 - DNA, 20 bp, Artificial Sequence
  Synthetic construct
tcggttgacaatcaatagtg

SEQ ID NO: 1975 - DNA, 20 bp, Artificial Sequence
  Synthetic construct
accattgcaatttagagatg

SEQ ID NO: 1976 - DNA, 20 bp, Artificial Sequence
  Synthetic construct
ctgatcacctgtctggagca

SEQ ID NO: 1977 - DNA, 20 bp, Artificial Sequence
  Synthetic construct
ggccatagaattctctctgg

SEQ ID NO: 1978 - DNA, 20 bp, Artificial Sequence
  Synthetic construct
taacctggtcttccttggtg

SEQ ID NO: 1979 - DNA, 30 bp, Artificial Sequence
  Synthetic construct
gaacaagtgttgtttgatcagtcatggttg

SEQ ID NO: 1980 - DNA, 30 bp, Artificial Sequence
  Synthetic construct
agacacatactctaagtcaggcagtggctg

SEQ ID NO: 1981 - DNA, 30 bp, Artificial Sequence
  Synthetic construct
tcgagtgtaatttagagagcagcgtggaga

SEQ ID NO: 1982 - DNA, 30 bp, Artificial Sequence
  Synthetic construct
gtgctctgttcagactctaataggaggtta

SEQ ID NO: 1983 - DNA, 30 bp, Artificial Sequence; identical to SEQ ID NO: 757
  Synthetic construct

SEQ ID NO: 1984 - DNA, 30 bp, Artificial Sequence; identical to SEQ ID NO: 758
  Synthetic construct

SEQ ID NO: 1985 - DNA, 30 bp, Artificial Sequence; identical to SEQ ID NO: 759
  Synthetic construct

SEQ ID NO: 1986 - DNA, 30 bp, Artificial Sequence; identical to SEQ ID NO: 760
  Synthetic construct

SEQ ID NO: 1987 - DNA, 30 bp, Artificial Sequence
  Synthetic construct
agggaccattgcaatttagagatgtggcca

SEQ ID NO: 1988 - DNA, 30 bp, Artificial Sequence
  Synthetic construct
agacctgatcacctgtctggagcaaggaag

SEQ ID NO: 1989 - DNA, 30 bp, Artificial Sequence
  Synthetic construct
atgtggccatagaattctctctggaggagt

SEQ ID NO: 1990 - DNA, 30 bp, Artificial Sequence
  Synthetic construct
acagtaacctggtcttccttggtgaggata

SEQ ID NO: 1991 - DNA, 20 bp, Artificial Sequence
  Synthetic construct
cccacccacagggatcaacg

SEQ ID NO: 1992 - DNA, 20 bp, Artificial Sequence
  Synthetic construct
cctacttaggcactgccagg

SEQ ID NO: 1993 - DNA, 20 bp, Artificial Sequence
  Synthetic construct
gagggtgccaccatgactag

SEQ ID NO: 1994 - DNA, 20 bp, Artificial Sequence
  Synthetic construct
cgggacacgtctacttggtg

SEQ ID NO: 1995 - DNA, 20 bp, Artificial Sequence
  Synthetic construct
gcagaacgaggctgccctag

SEQ ID NO: 1996 - DNA, 20 bp, Artificial Sequence
  Synthetic construct
gcggaccagtgtacagcacg

SEQ ID NO: 1997 - DNA, 20 bp, Artificial Sequence
  Synthetic construct
taaggtgaggactttgcaca

SEQ ID NO: 1998 - DNA, 20 bp, Artificial Sequence
  Synthetic construct
agccgtagtatctcccacac

SEQ ID NO: 1999 - DNA, 20 bp, Artificial Sequence
  Synthetic construct
ccacgacaagggacccgagg

SEQ ID NO: 2000 - DNA, 20 bp, Artificial Sequence
  Synthetic construct
cctgcacatacggagagtaa

SEQ ID NO: 2001 - DNA, 20 bp, Artificial Sequence
  Synthetic construct
ttccgcacagagacaaatgg

SEQ ID NO: 2002 - DNA, 20 bp, Artificial Sequence
  Synthetic construct
aagcagagtgcacagaagaa

SEQ ID NO: 2003 - DNA, 20 bp, Artificial Sequence
  Synthetic construct
ccgaaatgttgagtgtggtg

SEQ ID NO: 2004 - DNA, 20 bp, Artificial Sequence
  Synthetic construct
ctccagagaatttctccccg

SEQ ID NO: 2005 - DNA, 20 bp, Artificial Sequence
  Synthetic construct
tctttctagatcccatacag

SEQ ID NO: 2006 - DNA, 20 bp, Artificial Sequence
  Synthetic construct
acactggaacatatcaagac

SEQ ID NO: 2007 - DNA, 20 bp, Artificial Sequence
  Synthetic construct
gacaaatgcaatgaaaactg

SEQ ID NO: 2008 - DNA, 20 bp, Artificial Sequence
  Synthetic construct
ggacatcgtgtaccgcacca

SEQ ID NO: 2009 - DNA, 20 bp, Artificial Sequence
  Synthetic construct
ggccgcccgggaagtcaaca

SEQ ID NO: 2010 - DNA, 30 bp, Artificial Sequence; identical to SEQ ID NO: 714
  Synthetic construct

SEQ ID NO: 2011 - DNA, 30 bp, Artificial Sequence; identical to SEQ ID NO: 715
  Synthetic construct

SEQ ID NO: 2012 - DNA, 30 bp, Artificial Sequence; identical to SEQ ID NO: 716
  Synthetic construct

SEQ ID NO: 2013 - DNA, 30 bp, Artificial Sequence; identical to SEQ ID NO: 429
  Synthetic construct

SEQ ID NO: 2014 - DNA, 30 bp, Artificial Sequence; identical to SEQ ID NO: 430
  Synthetic construct

SEQ ID NO: 2015 - DNA, 30 bp, Artificial Sequence; identical to SEQ ID NO: 431
  Synthetic construct

SEQ ID NO: 2016 - DNA, 30 bp, Artificial Sequence; identical to SEQ ID NO: 432
  Synthetic construct

SEQ ID NO: 2017 - DNA, 30 bp, Artificial Sequence
  Synthetic construct
acacagccgtagtatctcccacactggacg

SEQ ID NO: 2018 - DNA, 30 bp, Artificial Sequence
  Synthetic construct
gcagccacgacaagggacccgaggcggagg

SEQ ID NO: 2019 - DNA, 30 bp, Artificial Sequence
  Synthetic construct
gtcccctgcacatacggagagtaagggtgt

SEQ ID NO: 2020 - DNA, 30 bp, Artificial Sequence
  Synthetic construct
ccagttccgcacagagacaaatggaggaca

SEQ ID NO: 2021 - DNA, 30 bp, Artificial Sequence
  Synthetic construct
gagaaagcagagtgcacagaagaaaggttg

SEQ ID NO: 2022 - DNA, 30 bp, Artificial Sequence
  Synthetic construct
ctccccgaaatgttgagtgtggtgaggtct

SEQ ID NO: 2023 - DNA, 30 bp, Artificial Sequence
  Synthetic construct
atgactccagagaatttctccccgaggaac

SEQ ID NO: 2024 - DNA, 30 bp, Artificial Sequence
  Synthetic construct
tttttctttctagatcccatacagtggtcc

SEQ ID NO: 2025 - DNA, 30 bp, Artificial Sequence; identical to SEQ ID NO: 413
  Synthetic construct

SEQ ID NO: 2026 - DNA, 30 bp, Artificial Sequence; identical to SEQ ID NO: 414
  Synthetic construct

SEQ ID NO: 2027 - DNA, 30 bp, Artificial Sequence; identical to SEQ ID NO: 415
  Synthetic construct

SEQ ID NO: 2028 - DNA, 30 bp, Artificial Sequence; identical to SEQ ID NO: 416
  Synthetic construct

SEQ ID NO: 2029 - DNA, 20 bp, Artificial Sequence
  Synthetic construct
atgatgtttgatgaccgtcg

SEQ ID NO: 2030 - DNA, 20 bp, Artificial Sequence
  Synthetic construct
ctgttgggacataccgctcg

SEQ ID NO: 2031 - DNA, 20 bp, Artificial Sequence
  Synthetic construct
gatgatatgagccctcgtcg

SEQ ID NO: 2032 - DNA, 20 bp, Artificial Sequence
  Synthetic construct
taaaatcaaagaacttcgag

SEQ ID NO: 2033 - DNA, 20 bp, Artificial Sequence
  Synthetic construct
ccgacctcgagtccccgcag

SEQ ID NO: 2034 - DNA, 20 bp, Artificial Sequence
  Synthetic construct
cgtggtggcgcggatcctag

SEQ ID NO: 2035 - DNA, 20 bp, Artificial Sequence
  Synthetic construct
cgtgtccatgtcgagccgcg

SEQ ID NO: 2036 - DNA, 20 bp, Artificial Sequence
  Synthetic construct
gagttctcaggtgcgccttg

SEQ ID NO: 2037 - DNA, 20 bp, Artificial Sequence
  Synthetic construct
accggcagcgtcaaacaccc

SEQ ID NO: 2038 - DNA, 20 bp, Artificial Sequence
  Synthetic construct
atgaccagaaaaacataaga

SEQ ID NO: 2039 - DNA, 20 bp, Artificial Sequence
  Synthetic construct
ccttcatggagaaatgccgt

SEQ ID NO: 2040 - DNA, 20 bp, Artificial Sequence
  Synthetic construct
ggtgcagagaaaccggcatg

SEQ ID NO: 2041 - DNA, 20 bp, Artificial Sequence
  Synthetic construct
actcgactacggcgtcaccg

SEQ ID NO: 2042 - DNA, 20 bp, Artificial Sequence
  Synthetic construct
cccactccatagaatctccg

SEQ ID NO: 2043 - DNA, 20 bp, Artificial Sequence
  Synthetic construct
ctgcaactgaaacgcaagcg

SEQ ID NO: 2044 - DNA, 20 bp, Artificial Sequence
  Synthetic construct
gggaccagccaagatcgagg

SEQ ID NO: 2045 - DNA, 20 bp, Artificial Sequence
  Synthetic construct
aacaggcattccggaaacgg

SEQ ID NO: 2046 - DNA, 20 bp, Artificial Sequence
  Synthetic construct
aggtcacgttctgcacaaag

SEQ ID NO: 2047 - DNA, 20 bp, Artificial Sequence
  Synthetic construct
ctaacttggacccaaactca

SEQ ID NO: 2048 - DNA, 20 bp, Artificial Sequence
  Synthetic construct
gcattacccctactaccgga

SEQ ID NO: 2049 - DNA, 20 bp, Artificial Sequence
  Synthetic construct
accaggcacacaagagactg

SEQ ID NO: 2050 - DNA, 20 bp, Artificial Sequence
  Synthetic construct
agaaatacggtccgaaacgt

SEQ ID NO: 2051 - DNA, 20 bp, Artificial Sequence
  Synthetic construct
agtctggaaagcgtcacttg

SEQ ID NO: 2052 - DNA, 20 bp, Artificial Sequence
  Synthetic construct
tatttacatgtaacgctaca

SEQ ID NO: 2053 - DNA, 20 bp, Artificial Sequence
  Synthetic construct
caaaatctcaccctgaaacg

SEQ ID NO: 2054 - DNA, 20 bp, Artificial Sequence
  Synthetic construct
ccacggcgaagcgccctccg

SEQ ID NO: 2055 - DNA, 20 bp, Artificial Sequence
  Synthetic construct
ggacacataatggcaaatcg

SEQ ID NO: 2056 - DNA, 20 bp, Artificial Sequence
  Synthetic construct
tgggtggtactgccatccgg

SEQ ID NO: 2057 - DNA, 20 bp, Artificial Sequence
  Synthetic construct
aagtcgacatactctcggct

SEQ ID NO: 2058 - DNA, 20 bp, Artificial Sequence
  Synthetic construct
cctgcctcacctcacactcg

SEQ ID NO: 2059 - DNA, 20 bp, Artificial Sequence
  Synthetic construct
gccgacttacgatttccgag

SEQ ID NO: 2060 - DNA, 20 bp, Artificial Sequence
  Synthetic construct
ggagtctgtgttatctggaa

SEQ ID NO: 2061 - DNA, 20 bp, Artificial Sequence
  Synthetic construct
aaaccagggccaccgaaagg

SEQ ID NO: 2062 - DNA, 20 bp, Artificial Sequence
  Synthetic construct
ccctcgcgcttgaggccgcg

SEQ ID NO: 2063 - DNA, 20 bp, Artificial Sequence
  Synthetic construct
cttcggtctcttcgacgacg

SEQ ID NO: 2064 - DNA, 20 bp, Artificial Sequence
  Synthetic construct
tcggggtaatagaacgcagg

SEQ ID NO: 2065 - DNA, 20 bp, Artificial Sequence
  Synthetic construct
cgatccaaatttgaacgccg

SEQ ID NO: 2066 - DNA, 20 bp, Artificial Sequence
  Synthetic construct
gagcaaactgcgttatacag

SEQ ID NO: 2067 - DNA, 20 bp, Artificial Sequence
  Synthetic construct
ttaccccagaaccagacgga

SEQ ID NO: 2068 - DNA, 20 bp, Artificial Sequence
  Synthetic construct
tttgtgcagttatgccagca

SEQ ID NO: 2069 - DNA, 20 bp, Artificial Sequence
  Synthetic construct
agcattatccaaagagtccg

SEQ ID NO: 2070 - DNA, 20 bp, Artificial Sequence
  Synthetic construct
ggaaacttgctgaacacccg

SEQ ID NO: 2071 - DNA, 20 bp, Artificial Sequence
  Synthetic construct
tccaaatggtaacgttcatg

SEQ ID NO: 2072 - DNA, 20 bp, Artificial Sequence
  Synthetic construct
tgtggattacttatataaca

SEQ ID NO: 2073 - DNA, 20 bp, Artificial Sequence
  Synthetic construct
ccagtcgacacccatcattg

SEQ ID NO: 2074 - DNA, 20 bp, Artificial Sequence
  Synthetic construct
ccccagtaaacgctccacag

SEQ ID NO: 2075 - DNA, 20 bp, Artificial Sequence
  Synthetic construct
gaacgtcaccttagaatccg

SEQ ID NO: 2076 - DNA, 20 bp, Artificial Sequence
  Synthetic construct
tctttgtctgccacaaacgt

SEQ ID NO: 2077 - DNA, 20 bp, Artificial Sequence
  Synthetic construct
ccattgttcaatatcgtccg

SEQ ID NO: 2078 - DNA, 20 bp, Artificial Sequence
  Synthetic construct
gagcgctgctcagatagcga

SEQ ID NO: 2079 - DNA, 20 bp, Artificial Sequence
  Synthetic construct
gatccactcacagtttccat

SEQ ID NO: 2080 - DNA, 20 bp, Artificial Sequence
  Synthetic construct
ggtgccctatgagccgcctg

SEQ ID NO: 2081 - DNA, 20 bp, Artificial Sequence
  Synthetic construct
cacggaccctgatagcatga

SEQ ID NO: 2082 - DNA, 20 bp, Artificial Sequence
  Synthetic construct
catcgctcaggagatatacg

SEQ ID NO: 2083 - DNA, 20 bp, Artificial Sequence
  Synthetic construct
gcagccgaatcgccaaccgc

SEQ ID NO: 2084 - DNA, 20 bp, Artificial Sequence
  Synthetic construct
gcttcgcagcctgctaacca

SEQ ID NO: 2085 - DNA, 20 bp, Artificial Sequence
  Synthetic construct
accggcagcgtcaaacaccc

SEQ ID NO: 2086 - DNA, 20 bp, Artificial Sequence
  Synthetic construct
atgaccagaaaaacataaga

SEQ ID NO: 2087 - DNA, 20 bp, Artificial Sequence
  Synthetic construct
ccttcatggagaaatgccgt

SEQ ID NO: 2088 - DNA, 20 bp, Artificial Sequence
  Synthetic construct
ggtgcagagaaaccggcatg

SEQ ID NO: 2089 - DNA, 20 bp, Artificial Sequence
  Synthetic construct
atgatgtttgatgaccgtcg

SEQ ID NO: 2090 - DNA, 20 bp, Artificial Sequence
  Synthetic construct
ctgttgggacataccgctcg

SEQ ID NO: 2091 - DNA, 20 bp, Artificial Sequence
  Synthetic construct
gatgatatgagccctcgtcg

SEQ ID NO: 2092 - DNA, 20 bp, Artificial Sequence
  Synthetic construct
taaaatcaaagaacttcgag

SEQ ID NO: 2093 - DNA, 20 bp, Artificial Sequence
  Synthetic construct
actcgactacggcgtcaccg

SEQ ID NO: 2094 - DNA, 20 bp, Artificial Sequence
  Synthetic construct
cccactccatagaatctccg

SEQ ID NO: 2095 - DNA, 20 bp, Artificial Sequence
  Synthetic construct
ctgcaactgaaacgcaagcg

SEQ ID NO: 2096 - DNA, 20 bp, Artificial Sequence
  Synthetic construct
gggaccagccaagatcgagg

SEQ ID NO: 2097 - DNA, 20 bp, Artificial Sequence
  Synthetic construct
aggatgcggatatgactctg

SEQ ID NO: 2098 - DNA, 20 bp, Artificial Sequence
  Synthetic construct
ggacgcgttcaagtaagcgt

SEQ ID NO: 2099 - DNA, 20 bp, Artificial Sequence
  Synthetic construct
ggggagcgagtgatgtacgt

SEQ ID NO: 2100 - DNA, 20 bp, Artificial Sequence
  Synthetic construct
tttggacagatctattccag

SEQ ID NO: 2101 - DNA, 20 bp, Artificial Sequence
  Synthetic construct
agagtgcatcgacccctcgg

SEQ ID NO: 2102 - DNA, 20 bp, Artificial Sequence
  Synthetic construct
ctgcggggaggactccgtcg

SEQ ID NO: 2103 - DNA, 20 bp, Artificial Sequence
  Synthetic construct
cttcggggagacaacgacgg

SEQ ID NO: 2104 - DNA, 20 bp, Artificial Sequence
  Synthetic construct
gctgcaccgagtcgtagtcg

SEQ ID NO: 2105 - DNA, 20 bp, Artificial Sequence
  Synthetic construct
gagaacctcggaacatacgg

SEQ ID NO: 2106 - DNA, 20 bp, Artificial Sequence
  Synthetic construct
gcagatcgagtcctacccca

SEQ ID NO: 2107 - DNA, 20 bp, Artificial Sequence
  Synthetic construct
tcttcttgtctcggcccatg

SEQ ID NO: 2108 - DNA, 20 bp, Artificial Sequence
  Synthetic construct
tgagaacgcatctcagcccg

SEQ ID NO: 2109 - DNA, 20 bp, Artificial Sequence
  Synthetic construct
ccgacctcgagtccccgcag

SEQ ID NO: 2110 - DNA, 20 bp, Artificial Sequence
  Synthetic construct
cgtggtggcgcggatcctag

SEQ ID NO: 2111 - DNA, 20 bp, Artificial Sequence
  Synthetic construct
cgtgtccatgtcgagccgcg

SEQ ID NO: 2112 - DNA, 20 bp, Artificial Sequence
  Synthetic construct
gagttctcaggtgcgccttg

SEQ ID NO: 2113 - DNA, 20 bp, Artificial Sequence
  Synthetic construct
gaactccctgccagatatcg

SEQ ID NO: 2114 - DNA, 20 bp, Artificial Sequence
  Synthetic construct
tctaggccgatacaaagcag

SEQ ID NO: 2115 - DNA, 20 bp, Artificial Sequence
  Synthetic construct
tctccctcgacagtcatgtg

SEQ ID NO: 2116 - DNA, 20 bp, Artificial Sequence
  Synthetic construct
ttaattccaaccaaatcccg

SEQ ID NO: 2117 - DNA, 20 bp, Artificial Sequence
  Synthetic construct
acaggttgccccacgcgttg

SEQ ID NO: 2118 - DNA, 20 bp, Artificial Sequence
  Synthetic construct
ggagtttagccagtccaact

SEQ ID NO: 2119 - DNA, 20 bp, Artificial Sequence
  Synthetic construct
ggtggcgcaaacgagtagca

SEQ ID NO: 2120 - DNA, 20 bp, Artificial Sequence
  Synthetic construct
tagcatttgagctagttcga

SEQ ID NO: 2121 - DNA, 20 bp, Artificial Sequence
  Synthetic construct
acctgatcccaaaacatgga

SEQ ID NO: 2122 - DNA, 20 bp, Artificial Sequence
  Synthetic construct
cagcattcggtagaccctga

SEQ ID NO: 2123 - DNA, 20 bp, Artificial Sequence
  Synthetic construct
ggatgcatgcggctagacat

SEQ ID NO: 2124 - DNA, 20 bp, Artificial Sequence
  Synthetic construct
tacctgcataggaagacacg

SEQ ID NO: 2125 - DNA, 20 bp, Artificial Sequence
  Synthetic construct
aaaccagggccaccgaaagg

SEQ ID NO: 2126 - DNA, 20 bp, Artificial Sequence
  Synthetic construct
ccctcgcgcttgaggccgcg

SEQ ID NO: 2127 - DNA, 20 bp, Artificial Sequence
  Synthetic construct
cttcggtctcttcgacgacg

SEQ ID NO: 2128 - DNA, 20 bp, Artificial Sequence
  Synthetic construct
tcggggtaatagaacgcagg

SEQ ID NO: 2129 - DNA, 20 bp, Artificial Sequence
  Synthetic construct
caaaatctcaccctgaaacg

SEQ ID NO: 2130 - DNA, 20 bp, Artificial Sequence
  Synthetic construct
ccacggcgaagcgccctccg

SEQ ID NO: 2131 - DNA, 20 bp, Artificial Sequence
  Synthetic construct
ggacacataatggcaaatcg

SEQ ID NO: 2132 - DNA, 20 bp, Artificial Sequence
  Synthetic construct
tgggtggtactgccatccgg

SEQ ID NO: 2133 - DNA, 20 bp, Artificial Sequence
  Synthetic construct
ccacttgttaacagagaccg

SEQ ID NO: 2134 - DNA, 20 bp, Artificial Sequence
  Synthetic construct
cttgtggcgctgaaaacgaa

SEQ ID NO: 2135 - DNA, 20 bp, Artificial Sequence
  Synthetic construct
tatgccatgagtgctcagag

SEQ ID NO: 2136 - DNA, 20 bp, Artificial Sequence
  Synthetic construct
tgagagactccagttgccag

SEQ ID NO: 2137 - DNA, 20 bp, Artificial Sequence
  Synthetic construct
aacaggcattccggaaacgg

SEQ ID NO: 2138 - DNA, 20 bp, Artificial Sequence
  Synthetic construct
aggtcacgttctgcacaaag

SEQ ID NO: 2139 - DNA, 20 bp, Artificial Sequence
  Synthetic construct
ctaacttggacccaaactca

SEQ ID NO: 2140 - DNA, 20 bp, Artificial Sequence
  Synthetic construct
gcattacccctactaccgga

SEQ ID NO: 2141 - DNA, 20 bp, Artificial Sequence
  Synthetic construct
accaggcacacaagagactg

SEQ ID NO: 2142 - DNA, 20 bp, Artificial Sequence
  Synthetic construct
agaaatacggtccgaaacgt

SEQ ID NO: 2143 - DNA, 20 bp, Artificial Sequence
  Synthetic construct
agtctggaaagcgtcacttg

SEQ ID NO: 2144 - DNA, 20 bp, Artificial Sequence
  Synthetic construct
tatttacatgtaacgctaca

SEQ ID NO: 2145 - DNA, 20 bp, Artificial Sequence
  Synthetic construct
aagtcgacatactctcggct

SEQ ID NO: 2146 - DNA, 20 bp, Artificial Sequence
  Synthetic construct
cctgcctcacctcacactcg

SEQ ID NO: 2147 - DNA, 20 bp, Artificial Sequence
  Synthetic construct
gccgacttacgatttccgag

SEQ ID NO: 2148 - DNA, 20 bp, Artificial Sequence
  Synthetic construct
ggagtctgtgttatctggaa

SEQ ID NO: 2149 - DNA, 20 bp, Artificial Sequence
  Synthetic construct
ccctggatagaatacatcgt

SEQ ID NO: 2150 - DNA, 20 bp, Artificial Sequence
  Synthetic construct
gacaagatgtcagacctagg

SEQ ID NO: 2151 - DNA, 20 bp, Artificial Sequence
  Synthetic construct
gaggtggaaggtaaacacaa

SEQ ID NO: 2152 - DNA, 20 bp, Artificial Sequence
  Synthetic construct
ttctaggataaccaccactg

SEQ ID NO: 2153 - DNA, 20 bp, Artificial Sequence
  Synthetic construct
acatcgactgctggacaatg

SEQ ID NO: 2154 - DNA, 20 bp, Artificial Sequence
  Synthetic construct
cagtgagtagtgccaaacca

SEQ ID NO: 2155 - DNA, 20 bp, Artificial Sequence
  Synthetic construct
gtggcgtactgcacgtgtcg

SEQ ID NO: 2156 - DNA, 20 bp, Artificial Sequence
  Synthetic construct
ttcacattatgaccaacacc

SEQ ID NO: 2157 - DNA, 30 bp, Artificial Sequence; identical to SEQ ID NO: 1405
  Synthetic construct

SEQ ID NO: 2158 - DNA, 30 bp, Artificial Sequence; identical to SEQ ID NO: 1406
  Synthetic construct

SEQ ID NO: 2159 - DNA, 30 bp, Artificial Sequence; identical to SEQ ID NO: 1407
  Synthetic construct

SEQ ID NO: 2160 - DNA, 30 bp, Artificial Sequence; identical to SEQ ID NO: 1408
  Synthetic construct

SEQ ID NO: 2161 - DNA, 30 bp, Artificial Sequence; identical to SEQ ID NO: 857
  Synthetic construct

SEQ ID NO: 2162 - DNA, 30 bp, Artificial Sequence; identical to SEQ ID NO: 858
  Synthetic construct

SEQ ID NO: 2163 - DNA, 30 bp, Artificial Sequence; identical to SEQ ID NO: 859
  Synthetic construct

SEQ ID NO: 2164 - DNA, 30 bp, Artificial Sequence; identical to SEQ ID NO: 860
  Synthetic construct

SEQ ID NO: 2165 - DNA, 30 bp, Artificial Sequence; identical to SEQ ID NO: 617
  Synthetic construct

SEQ ID NO: 2166 - DNA, 30 bp, Artificial Sequence; identical to SEQ ID NO: 618
  Synthetic construct

SEQ ID NO: 2167 - DNA, 30 bp, Artificial Sequence; identical to SEQ ID NO: 619
  Synthetic construct

SEQ ID NO: 2168 - DNA, 30 bp, Artificial Sequence; identical to SEQ ID NO: 620
  Synthetic construct

SEQ ID NO: 2169 - DNA, 30 bp, Artificial Sequence; identical to SEQ ID NO: 1409
  Synthetic construct

SEQ ID NO: 2170 - DNA, 30 bp, Artificial Sequence; identical to SEQ ID NO: 1410
  Synthetic construct

SEQ ID NO: 2171 - DNA, 30 bp, Artificial Sequence; identical to SEQ ID NO: 1411
  Synthetic construct

SEQ ID NO: 2172 - DNA, 30 bp, Artificial Sequence; identical to SEQ ID NO: 1412
  Synthetic construct

SEQ ID NO: 2173 - DNA, 30 bp, Artificial Sequence; identical to SEQ ID NO: 1453
  Synthetic construct

SEQ ID NO: 2174 - DNA, 30 bp, Artificial Sequence; identical to SEQ ID NO: 1454
  Synthetic construct

SEQ ID NO: 2175 - DNA, 30 bp, Artificial Sequence; identical to SEQ ID NO: 1455
  Synthetic construct

SEQ ID NO: 2176 - DNA, 30 bp, Artificial Sequence; identical to SEQ ID NO: 1456
  Synthetic construct

SEQ ID NO: 2177 - DNA, 30 bp, Artificial Sequence; identical to SEQ ID NO: 609
  Synthetic construct

SEQ ID NO: 2178 - DNA, 30 bp, Artificial Sequence; identical to SEQ ID NO: 610
  Synthetic construct

SEQ ID NO: 2179 - DNA, 30 bp, Artificial Sequence; identical to SEQ ID NO: 611
  Synthetic construct

SEQ ID NO: 2180 - DNA, 30 bp, Artificial Sequence; identical to SEQ ID NO: 612
  Synthetic construct

SEQ ID NO: 2181 - DNA, 30 bp, Artificial Sequence; identical to SEQ ID NO: 1445
  Synthetic construct

SEQ ID NO: 2182 - DNA, 30 bp, Artificial Sequence; identical to SEQ ID NO: 1446
  Synthetic construct

SEQ ID NO: 2183 - DNA, 30 bp, Artificial Sequence; identical to SEQ ID NO: 1447
  Synthetic construct

SEQ ID NO: 2184 - DNA, 30 bp, Artificial Sequence; identical to SEQ ID NO: 1448
  Synthetic construct

SEQ ID NO: 2185 - DNA, 30 bp, Artificial Sequence; identical to SEQ ID NO: 717
  Synthetic construct

SEQ ID NO: 2186 - DNA, 30 bp, Artificial Sequence; identical to SEQ ID NO: 718
  Synthetic construct

SEQ ID NO: 2187 - DNA, 30 bp, Artificial Sequence; identical to SEQ ID NO: 719
  Synthetic construct

SEQ ID NO: 2188 - DNA, 30 bp, Artificial Sequence; identical to SEQ ID NO: 720
  Synthetic construct

SEQ ID NO: 2189 - DNA, 30 bp, Artificial Sequence; identical to SEQ ID NO: 1441
  Synthetic construct

SEQ ID NO: 2190 - DNA, 30 bp, Artificial Sequence; identical to SEQ ID NO: 1442
  Synthetic construct

SEQ ID NO: 2191 - DNA, 30 bp, Artificial Sequence; identical to SEQ ID NO: 1443
  Synthetic construct

SEQ ID NO: 2192 - DNA, 30 bp, Artificial Sequence; identical to SEQ ID NO: 1444
  Synthetic construct

SEQ ID NO: 2193 - DNA, 30 bp, Artificial Sequence; identical to SEQ ID NO: 1381
  Synthetic construct

SEQ ID NO: 2194 - DNA, 30 bp, Artificial Sequence; identical to SEQ ID NO: 1382
  Synthetic construct

SEQ ID NO: 2195 - DNA, 30 bp, Artificial Sequence; identical to SEQ ID NO: 1383
  Synthetic construct

SEQ ID NO: 2196 - DNA, 30 bp, Artificial Sequence; identical to SEQ ID NO: 1384
  Synthetic construct

SEQ ID NO: 2197 - DNA, 30 bp, Artificial Sequence; identical to SEQ ID NO: 1385
  Synthetic construct

SEQ ID NO: 2198 - DNA, 30 bp, Artificial Sequence; identical to SEQ ID NO: 1386
  Synthetic construct

SEQ ID NO: 2199 - DNA, 30 bp, Artificial Sequence; identical to SEQ ID NO: 1387
  Synthetic construct

SEQ ID NO: 2200 - DNA, 30 bp, Artificial Sequence; identical to SEQ ID NO: 1388
  Synthetic construct

SEQ ID NO: 2201 - DNA, 30 bp, Artificial Sequence; identical to SEQ ID NO: 1389
  Synthetic construct

SEQ ID NO: 2202 - DNA, 30 bp, Artificial Sequence; identical to SEQ ID NO: 1390
  Synthetic construct

SEQ ID NO: 2203 - DNA, 30 bp, Artificial Sequence; identical to SEQ ID NO: 1391
  Synthetic construct

SEQ ID NO: 2204 - DNA, 30 bp, Artificial Sequence; identical to SEQ ID NO: 1392
  Synthetic construct

SEQ ID NO: 2205 - DNA, 30 bp, Artificial Sequence; identical to SEQ ID NO: 585
  Synthetic construct

SEQ ID NO: 2206 - DNA, 30 bp, Artificial Sequence; identical to SEQ ID NO: 586
  Synthetic construct

SEQ ID NO: 2207 - DNA, 30 bp, Artificial Sequence; identical to SEQ ID NO: 587
  Synthetic construct

SEQ ID NO: 2208 - DNA, 30 bp, Artificial Sequence; identical to SEQ ID NO: 588
  Synthetic construct

SEQ ID NO: 2209 - DNA, 30 bp, Artificial Sequence; identical to SEQ ID NO: 1161
  Synthetic construct

SEQ ID NO: 2210 - DNA, 30 bp, Artificial Sequence; identical to SEQ ID NO: 1162
  Synthetic construct

SEQ ID NO: 2211 - DNA, 30 bp, Artificial Sequence; identical to SEQ ID NO: 1163
  Synthetic construct

SEQ ID NO: 2212 - DNA, 30 bp, Artificial Sequence; identical to SEQ ID NO: 1164
  Synthetic construct

SEQ ID NO: 2213 - DNA, 30 bp, Artificial Sequence; identical to SEQ ID NO: 617
  Synthetic construct

SEQ ID NO: 2214 - DNA, 30 bp, Artificial Sequence; identical to SEQ ID NO: 618
  Synthetic construct

SEQ ID NO: 2215 - DNA, 30 bp, Artificial Sequence; identical to SEQ ID NO: 619
  Synthetic construct

SEQ ID NO: 2216 - DNA, 30 bp, Artificial Sequence; identical to SEQ ID NO: 620
  Synthetic construct

SEQ ID NO: 2217 - DNA, 30 bp, Artificial Sequence; identical to SEQ ID NO: 1405
  Synthetic construct

SEQ ID NO: 2218 - DNA, 30 bp, Artificial Sequence; identical to SEQ ID NO: 1406
  Synthetic construct

SEQ ID NO: 2219 - DNA, 30 bp, Artificial Sequence; identical to SEQ ID NO: 1407
  Synthetic construct

SEQ ID NO: 2220 - DNA, 30 bp, Artificial Sequence; identical to SEQ ID NO: 1408
  Synthetic construct

SEQ ID NO: 2221 - DNA, 30 bp, Artificial Sequence; identical to SEQ ID NO: 1409
  Synthetic construct

SEQ ID NO: 2222 - DNA, 30 bp, Artificial Sequence; identical to SEQ ID NO: 1410
  Synthetic construct

SEQ ID NO: 2223 - DNA, 30 bp, Artificial Sequence; identical to SEQ ID NO: 1411
  Synthetic construct

SEQ ID NO: 2224 - DNA, 30 bp, Artificial Sequence; identical to SEQ ID NO: 1412
  Synthetic construct

SEQ ID NO: 2225 - DNA, 30 bp, Artificial Sequence; identical to SEQ ID NO: 893
  Synthetic construct

SEQ ID NO: 2226 - DNA, 30 bp, Artificial Sequence; identical to SEQ ID NO: 894
  Synthetic construct

SEQ ID NO: 2227 - DNA, 30 bp, Artificial Sequence; identical to SEQ ID NO: 895
  Synthetic construct

SEQ ID NO: 2228 - DNA, 30 bp, Artificial Sequence; identical to SEQ ID NO: 896
  Synthetic construct

SEQ ID NO: 2229 - DNA, 30 bp, Artificial Sequence; identical to SEQ ID NO: 1417
  Synthetic construct

SEQ ID NO: 2230 - DNA, 30 bp, Artificial Sequence; identical to SEQ ID NO: 1418
  Synthetic construct

SEQ ID NO: 2231 - DNA, 30 bp, Artificial Sequence; identical to SEQ ID NO: 1419
  Synthetic construct

SEQ ID NO: 2232 - DNA, 30 bp, Artificial Sequence; identical to SEQ ID NO: 1420
  Synthetic construct

SEQ ID NO: 2233 - DNA, 30 bp, Artificial Sequence; identical to SEQ ID NO: 597
  Synthetic construct

SEQ ID NO: 2234 - DNA, 30 bp, Artificial Sequence; identical to SEQ ID NO: 598
  Synthetic construct

SEQ ID NO: 2235 - DNA, 30 bp, Artificial Sequence; identical to SEQ ID NO: 599
  Synthetic construct

SEQ ID NO: 2236 - DNA, 30 bp, Artificial Sequence; identical to SEQ ID NO: 600
  Synthetic construct

SEQ ID NO: 2237 - DNA, 30 bp, Artificial Sequence; identical to SEQ ID NO: 857
  Synthetic construct

SEQ ID NO: 2238 - DNA, 30 bp, Artificial Sequence; identical to SEQ ID NO: 858
  Synthetic construct

SEQ ID NO: 2239 - DNA, 30 bp, Artificial Sequence; identical to SEQ ID NO: 859
  Synthetic construct

SEQ ID NO: 2240 - DNA, 30 bp, Artificial Sequence; identical to SEQ ID NO: 860
  Synthetic construct

SEQ ID NO: 2241 - DNA, 30 bp, Artificial Sequence; identical to SEQ ID NO: 417
  Synthetic construct

SEQ ID NO: 2242 - DNA, 30 bp, Artificial Sequence; identical to SEQ ID NO: 418
  Synthetic construct

SEQ ID NO: 2243 - DNA, 30 bp, Artificial Sequence; identical to SEQ ID NO: 419
  Synthetic construct

SEQ ID NO: 2244 - DNA, 30 bp, Artificial Sequence; identical to SEQ ID NO: 420
  Synthetic construct

SEQ ID NO: 2245 - DNA, 30 bp, Artificial Sequence; identical to SEQ ID NO: 393
  Synthetic construct

SEQ ID NO: 2246 - DNA, 30 bp, Artificial Sequence; identical to SEQ ID NO: 394
  Synthetic construct

SEQ ID NO: 2247 - DNA, 30 bp, Artificial Sequence; identical to SEQ ID NO: 395
  Synthetic construct

SEQ ID NO: 2248 - DNA, 30 bp, Artificial Sequence; identical to SEQ ID NO: 396
  Synthetic construct

SEQ ID NO: 2249 - DNA, 30 bp, Artificial Sequence; identical to SEQ ID NO: 1213
  Synthetic construct

SEQ ID NO: 2250 - DNA, 30 bp, Artificial Sequence; identical to SEQ ID NO: 1214
  Synthetic construct

SEQ ID NO: 2251 - DNA, 30 bp, Artificial Sequence; identical to SEQ ID NO: 1215
  Synthetic construct

SEQ ID NO: 2252 - DNA, 30 bp, Artificial Sequence; identical to SEQ ID NO: 1216
  Synthetic construct

SEQ ID NO: 2253 - DNA, 30 bp, Artificial Sequence; identical to SEQ ID NO: 1441
  Synthetic construct

SEQ ID NO: 2254 - DNA, 30 bp, Artificial Sequence; identical to SEQ ID NO: 1442
  Synthetic construct

SEQ ID NO: 2255 - DNA, 30 bp, Artificial Sequence; identical to SEQ ID NO: 1443
  Synthetic construct

SEQ ID NO: 2256 - DNA, 30 bp, Artificial Sequence; identical to SEQ ID NO: 1444
  Synthetic construct

SEQ ID NO: 2257 - DNA, 30 bp, Artificial Sequence; identical to SEQ ID NO: 1445
  Synthetic construct

SEQ ID NO: 2258 - DNA, 30 bp, Artificial Sequence; identical to SEQ ID NO: 1446
  Synthetic construct

SEQ ID NO: 2259 - DNA, 30 bp, Artificial Sequence; identical to SEQ ID NO: 1447
  Synthetic construct

SEQ ID NO: 2260 - DNA, 30 bp, Artificial Sequence; identical to SEQ ID NO: 1448
  Synthetic construct

SEQ ID NO: 2261 - DNA, 30 bp, Artificial Sequence; identical to SEQ ID NO: 1449
  Synthetic construct

SEQ ID NO: 2262 - DNA, 30 bp, Artificial Sequence; identical to SEQ ID NO: 1450
  Synthetic construct

SEQ ID NO: 2263 - DNA, 30 bp, Artificial Sequence; identical to SEQ ID NO: 1451
  Synthetic construct

SEQ ID NO: 2264 - DNA, 30 bp, Artificial Sequence; identical to SEQ ID NO: 1452
  Synthetic construct

SEQ ID NO: 2265 - DNA, 30 bp, Artificial Sequence; identical to SEQ ID NO: 1453
  Synthetic construct

SEQ ID NO: 2266 - DNA, 30 bp, Artificial Sequence; identical to SEQ ID NO: 1454
  Synthetic construct

SEQ ID NO: 2267 - DNA, 30 bp, Artificial Sequence; identical to SEQ ID NO: 1455
  Synthetic construct

SEQ ID NO: 2268 - DNA, 30 bp, Artificial Sequence; identical to SEQ ID NO: 1456
  Synthetic construct

SEQ ID NO: 2269 - DNA, 30 bp, Artificial Sequence; identical to SEQ ID NO: 609
  Synthetic construct

SEQ ID NO: 2270 - DNA, 30 bp, Artificial Sequence; identical to SEQ ID NO: 610
  Synthetic construct

SEQ ID NO: 2271 - DNA, 30 bp, Artificial Sequence; identical to SEQ ID NO: 611
  Synthetic construct

SEQ ID NO: 2272 - DNA, 30 bp, Artificial Sequence; identical to SEQ ID NO: 612
  Synthetic construct

SEQ ID NO: 2273 - DNA, 30 bp, Artificial Sequence; identical to SEQ ID NO: 717
  Synthetic construct

SEQ ID NO: 2274 - DNA, 30 bp, Artificial Sequence; identical to SEQ ID NO: 718
  Synthetic construct

SEQ ID NO: 2275 - DNA, 30 bp, Artificial Sequence; identical to SEQ ID NO: 719
  Synthetic construct

SEQ ID NO: 2276 - DNA, 30 bp, Artificial Sequence; identical to SEQ ID NO: 720
  Synthetic construct

SEQ ID NO: 2277 - DNA, 30 bp, Artificial Sequence; identical to SEQ ID NO: 1465
  Synthetic construct

SEQ ID NO: 2278 - DNA, 30 bp, Artificial Sequence; identical to SEQ ID NO: 1466
  Synthetic construct

SEQ ID NO: 2279 - DNA, 30 bp, Artificial Sequence; identical to SEQ ID NO: 1467
  Synthetic construct

SEQ ID NO: 2280 - DNA, 30 bp, Artificial Sequence; identical to SEQ ID NO: 1468
  Synthetic construct

SEQ ID NO: 2281 - DNA, 30 bp, Artificial Sequence; identical to SEQ ID NO: 397
  Synthetic construct

SEQ ID NO: 2282 - DNA, 30 bp, Artificial Sequence; identical to SEQ ID NO: 398
  Synthetic construct

SEQ ID NO: 2283 - DNA, 30 bp, Artificial Sequence; identical to SEQ ID NO: 399
  Synthetic construct

SEQ ID NO: 2284 - DNA, 30 bp, Artificial Sequence; identical to SEQ ID NO: 400
  Synthetic construct

SEQ ID NO: 2285 - DNA, 20 bp, Artificial Sequence
  Synthetic construct
acaggttgccccacgcgttg

SEQ ID NO: 2286 - DNA, 20 bp, Artificial Sequence
  Synthetic construct
ggagtttagccagtccaact

SEQ ID NO: 2287 - DNA, 20 bp, Artificial Sequence
  Synthetic construct
ggtggcgcaaacgagtagca

SEQ ID NO: 2288 - DNA, 20 bp, Artificial Sequence
  Synthetic construct
tagcatttgagctagttcga

SEQ ID NO: 2289 - DNA, 20 bp, Artificial Sequence
  Synthetic construct
agagcgtgcagataatgaca

SEQ ID NO: 2290 - DNA, 20 bp, Artificial Sequence
  Synthetic construct
agctggcagaccacaaactg

SEQ ID NO: 2291 - DNA, 20 bp, Artificial Sequence
  Synthetic construct
attcttcataccaggaccag

SEQ ID NO: 2292 - DNA, 20 bp, Artificial Sequence
  Synthetic construct
ccaattcaggacccacacga

SEQ ID NO: 2293 - DNA, 20 bp, Artificial Sequence
  Synthetic construct
cagccaggacaacaatgcga

SEQ ID NO: 2294 - DNA, 20 bp, Artificial Sequence
  Synthetic construct
gtggccttaatgttctcctg

SEQ ID NO: 2295 - DNA, 20 bp, Artificial Sequence
  Synthetic construct
gttcattgtacaatatatgg

SEQ ID NO: 2296 - DNA, 20 bp, Artificial Sequence
  Synthetic construct
taagaggtcagaccgtcgtg

SEQ ID NO: 2297 - DNA, 20 bp, Artificial Sequence
  Synthetic construct
ctgcagggaacctccaccat

SEQ ID NO: 2298 - DNA, 20 bp, Artificial Sequence
  Synthetic construct
ggatacagggctctacacag

SEQ ID NO: 2299 - DNA, 20 bp, Artificial Sequence
  Synthetic construct
tggctttgaatgtggcgtgt

SEQ ID NO: 2300 - DNA, 20 bp, Artificial Sequence
  Synthetic construct
ttgtttcgttgtgttccgag

SEQ ID NO: 2301 - DNA, 20 bp, Artificial Sequence
  Synthetic construct
cacggaccctgatagcatga

SEQ ID NO: 2302 - DNA, 20 bp, Artificial Sequence
  Synthetic construct
catcgctcaggagatatacg

SEQ ID NO: 2303 - DNA, 20 bp, Artificial Sequence
  Synthetic construct
gcagccgaatcgccaaccgc

SEQ ID NO: 2304 - DNA, 20 bp, Artificial Sequence
  Synthetic construct
gcttcgcagcctgctaacca

SEQ ID NO: 2305 - DNA, 20 bp, Artificial Sequence
  Synthetic construct
actacgacctgaatgctgtg

SEQ ID NO: 2306 - DNA, 20 bp, Artificial Sequence
  Synthetic construct
gcttccgctacaagtgcgag

SEQ ID NO: 2307 - DNA, 20 bp, Artificial Sequence
  Synthetic construct
ggaagatctcatccccaccg

SEQ ID NO: 2308 - DNA, 20 bp, Artificial Sequence
  Synthetic construct
tcaatggctacacaggacca

SEQ ID NO: 2309 - DNA, 20 bp, Artificial Sequence
  Synthetic construct
agaggaggagacacatgtcg

SEQ ID NO: 2310 - DNA, 20 bp, Artificial Sequence
  Synthetic construct
catacaccatgtccatagag

SEQ ID NO: 2311 - DNA, 20 bp, Artificial Sequence
  Synthetic construct
gccttctgacaattcagccc

SEQ ID NO: 2312 - DNA, 20 bp, Artificial Sequence
  Synthetic construct
gttctgtagacttcacatgc

SEQ ID NO: 2313 - DNA, 20 bp, Artificial Sequence
  Synthetic construct
acattctgtacaatgaacag

SEQ ID NO: 2314 - DNA, 20 bp, Artificial Sequence
  Synthetic construct
atcaagcgtgctgaccggcg

SEQ ID NO: 2315 - DNA, 20 bp, Artificial Sequence
  Synthetic construct
cagccaggaccacaatgcca

SEQ ID NO: 2316 - DNA, 20 bp, Artificial Sequence
  Synthetic construct
cgtgcacatgaatccccccc

SEQ ID NO: 2317 - DNA, 20 bp, Artificial Sequence
  Synthetic construct
ctgcagggaacctccaccat

SEQ ID NO: 2318 - DNA, 20 bp, Artificial Sequence
  Synthetic construct
ggatacagggctctacacag

SEQ ID NO: 2319 - DNA, 20 bp, Artificial Sequence
  Synthetic construct
tggctttgaatgtggcgtgt

SEQ ID NO: 2320 - DNA, 20 bp, Artificial Sequence
  Synthetic construct
ttgtttcgttgtgttccgag

SEQ ID NO: 2321 - DNA, 20 bp, Artificial Sequence
  Synthetic construct
cagccaggacaacaatgcga

SEQ ID NO: 2322 - DNA, 20 bp, Artificial Sequence
  Synthetic construct
gtggccttaatgttctcctg

SEQ ID NO: 2323 - DNA, 20 bp, Artificial Sequence
  Synthetic construct
gttcattgtacaatatatgg

SEQ ID NO: 2324 - DNA, 20 bp, Artificial Sequence
  Synthetic construct
taagaggtcagaccgtcgtg

SEQ ID NO: 2325 - DNA, 20 bp, Artificial Sequence
  Synthetic construct
agaggaggagacacatgtcg

SEQ ID NO: 2326 - DNA, 20 bp, Artificial Sequence
  Synthetic construct
catacaccatgtccatagag

SEQ ID NO: 2327 - DNA, 20 bp, Artificial Sequence
  Synthetic construct
gccttctgacaattcagccc

SEQ ID NO: 2328 - DNA, 20 bp, Artificial Sequence
  Synthetic construct
gttctgtagacttcacatgc

SEQ ID NO: 2329 - DNA, 20 bp, Artificial Sequence
  Synthetic construct
acattctgtacaatgaacag

SEQ ID NO: 2330 - DNA, 20 bp, Artificial Sequence
  Synthetic construct
atcaagcgtgctgaccggcg

SEQ ID NO: 2331 - DNA, 20 bp, Artificial Sequence
  Synthetic construct
cagccaggaccacaatgcca

SEQ ID NO: 2332 - DNA, 20 bp, Artificial Sequence
  Synthetic construct
cgtgcacatgaatccccccc

SEQ ID NO: 2333 - DNA, 20 bp, Artificial Sequence
  Synthetic construct
aggtaccctccgacccacca

SEQ ID NO: 2334 - DNA, 20 bp, Artificial Sequence
  Synthetic construct
cagggagtgtgtgaactgtg

SEQ ID NO: 2335 - DNA, 20 bp, Artificial Sequence
  Synthetic construct
ggagctgtactcgggcacgt

SEQ ID NO: 2336 - DNA, 20 bp, Artificial Sequence
  Synthetic construct
tccaagacgtccatccacca

SEQ ID NO: 2337 - DNA, 20 bp, Artificial Sequence
  Synthetic construct
aagatcagtagcggtcccgg

SEQ ID NO: 2338 - DNA, 20 bp, Artificial Sequence
  Synthetic construct
agaaaggacgtcgatcgagg

SEQ ID NO: 2339 - DNA, 20 bp, Artificial Sequence
  Synthetic construct
aggggtcttaatgatccgcg

SEQ ID NO: 2340 - DNA, 20 bp, Artificial Sequence
  Synthetic construct
ttgaccataattatgctcag

SEQ ID NO: 2341 - DNA, 20 bp, Artificial Sequence
  Synthetic construct
agagcgtgcagataatgaca

SEQ ID NO: 2342 - DNA, 20 bp, Artificial Sequence
  Synthetic construct
agctggcagaccacaaactg

SEQ ID NO: 2343 - DNA, 20 bp, Artificial Sequence
  Synthetic construct
attcttcataccaggaccag

SEQ ID NO: 2344 - DNA, 20 bp, Artificial Sequence
  Synthetic construct
ccaattcaggacccacacga

SEQ ID NO: 2345 - DNA, 20 bp, Artificial Sequence
  Synthetic construct
actacgacctgaatgctgtg

SEQ ID NO: 2346 - DNA, 20 bp, Artificial Sequence
  Synthetic construct
gcttccgctacaagtgcgag

SEQ ID NO: 2347 - DNA, 20 bp, Artificial Sequence
  Synthetic construct
ggaagatctcatccccaccg

SEQ ID NO: 2348 - DNA, 20 bp, Artificial Sequence
  Synthetic construct
tcaatggctacacaggacca

SEQ ID NO: 2349 - DNA, 20 bp, Artificial Sequence
  Synthetic construct
cttactaatgaagtaatccg

SEQ ID NO: 2350 - DNA, 20 bp, Artificial Sequence
  Synthetic construct
gagaaagcagtctttaccca

SEQ ID NO: 2351 - DNA, 20 bp, Artificial Sequence
  Synthetic construct
ggtctcggagaatgaccgag

SEQ ID NO: 2352 - DNA, 20 bp, Artificial Sequence
  Synthetic construct
tgcatggggaggaccagtcg

SEQ ID NO: 2353 - DNA, 20 bp, Artificial Sequence
  Synthetic construct
aaagaacaaatggaacgcga

SEQ ID NO: 2354 - DNA, 20 bp, Artificial Sequence
  Synthetic construct
cacctagtaagtcgtttagg

SEQ ID NO: 2355 - DNA, 20 bp, Artificial Sequence
  Synthetic construct
catgccagttcacagcagtg

SEQ ID NO: 2356 - DNA, 20 bp, Artificial Sequence
  Synthetic construct
cattgcctcaggaacaaagg

SEQ ID NO: 2357 - DNA, 20 bp, Artificial Sequence
  Synthetic construct
acggctatgtgcaatctgcg

SEQ ID NO: 2358 - DNA, 20 bp, Artificial Sequence
  Synthetic construct
gccctggctggatcccgcag

SEQ ID NO: 2359 - DNA, 20 bp, Artificial Sequence
  Synthetic construct
ggacaacaaagactgcacag

SEQ ID NO: 2360 - DNA, 20 bp, Artificial Sequence
  Synthetic construct
gtggcttcacatcttcaggg

SEQ ID NO: 2361 - DNA, 20 bp, Artificial Sequence
  Synthetic construct
agatcgaagtatgcctcacc

SEQ ID NO: 2362 - DNA, 20 bp, Artificial Sequence
  Synthetic construct
agtgcatactgtagtccttg

SEQ ID NO: 2363 - DNA, 20 bp, Artificial Sequence
  Synthetic construct
gagcccccaactgacgaatg

SEQ ID NO: 2364 - DNA, 20 bp, Artificial Sequence
  Synthetic construct
taattagtactactatgcac

SEQ ID NO: 2365 - DNA, 20 bp, Artificial Sequence
  Synthetic construct
caatgaacgagcaacagcaa

SEQ ID NO: 2366 - DNA, 20 bp, Artificial Sequence
  Synthetic construct
ccgtacactcagcatgaccc

SEQ ID NO: 2367 - DNA, 20 bp, Artificial Sequence
  Synthetic construct
gaaatcgccaggcagttcgg

SEQ ID NO: 2368 - DNA, 20 bp, Artificial Sequence
  Synthetic construct
tccaggatcagttcaaaccg

SEQ ID NO: 2369 - DNA, 20 bp, Artificial Sequence
  Synthetic construct
acagctcaagcgcttcatcc

SEQ ID NO: 2370 - DNA, 20 bp, Artificial Sequence
  Synthetic construct
aggctccccggacatctggg

SEQ ID NO: 2371 - DNA, 20 bp, Artificial Sequence
  Synthetic construct
cactaacccccgagactcag

SEQ ID NO: 2372 - DNA, 20 bp, Artificial Sequence
  Synthetic construct
cgcatgcagagcatcaacgc

SEQ ID NO: 2373 - DNA, 20 bp, Artificial Sequence
  Synthetic construct
aagatgaactgcgatgtgtg

SEQ ID NO: 2374 - DNA, 20 bp, Artificial Sequence
  Synthetic construct
caagcagagaagttcccttg

SEQ ID NO: 2375 - DNA, 20 bp, Artificial Sequence
  Synthetic construct
gctcatacagacccgcatga

SEQ ID NO: 2376 - DNA, 20 bp, Artificial Sequence
  Synthetic construct
ggacagattagcaagcaatg

SEQ ID NO: 2377 - DNA, 20 bp, Artificial Sequence
  Synthetic construct
aggttggtgactgtgaacgc

SEQ ID NO: 2378 - DNA, 20 bp, Artificial Sequence
  Synthetic construct
agttcatcgacaacaagctg

SEQ ID NO: 2379 - DNA, 20 bp, Artificial Sequence
  Synthetic construct
gggctgacactagcagacac

SEQ ID NO: 2380 - DNA, 20 bp, Artificial Sequence
  Synthetic construct
tctgttgtggggtctgaacg

SEQ ID NO: 2381 - DNA, 20 bp, Artificial Sequence
  Synthetic construct
aaagctccacatataaatgg

SEQ ID NO: 2382 - DNA, 20 bp, Artificial Sequence
  Synthetic construct
acaaagcagctcatgagcca

SEQ ID NO: 2383 - DNA, 20 bp, Artificial Sequence
  Synthetic construct
caacattaaagcctggacac

SEQ ID NO: 2384 - DNA, 20 bp, Artificial Sequence
  Synthetic construct
tgaaggcaattgtgtcatcg

SEQ ID NO: 2385 - DNA, 20 bp, Artificial Sequence
  Synthetic construct
acagaacgcggctctacgca

SEQ ID NO: 2386 - DNA, 20 bp, Artificial Sequence
  Synthetic construct
aggactctacctgtttgcca

SEQ ID NO: 2387 - DNA, 20 bp, Artificial Sequence
  Synthetic construct
atgtgagaagagttcagagg

SEQ ID NO: 2388 - DNA, 20 bp, Artificial Sequence
  Synthetic construct
ggagatcaagcagctcacag

SEQ ID NO: 2389 - DNA, 20 bp, Artificial Sequence
  Synthetic construct
actgtcactaacctactggt

SEQ ID NO: 2390 - DNA, 20 bp, Artificial Sequence
  Synthetic construct
cccgcccgctgactgcacat

SEQ ID NO: 2391 - DNA, 20 bp, Artificial Sequence
  Synthetic construct
ctctaccgcccggaaaacgt

SEQ ID NO: 2392 - DNA, 20 bp, Artificial Sequence
  Synthetic construct
ttgggccagagtacgatgca

SEQ ID NO: 2393 - DNA, 20 bp, Artificial Sequence
  Synthetic construct
gaaaatgaatggctcccaca

SEQ ID NO: 2394 - DNA, 20 bp, Artificial Sequence
  Synthetic construct
gatggcttggtccatcacgt

SEQ ID NO: 2395 - DNA, 20 bp, Artificial Sequence
  Synthetic construct
ggggcctcattcacccagaa

SEQ ID NO: 2396 - DNA, 20 bp, Artificial Sequence
  Synthetic construct
tccaagagtgacagagtcgt

SEQ ID NO: 2397 - DNA, 20 bp, Artificial Sequence
  Synthetic construct
cagacccgtacaaagtgtac

SEQ ID NO: 2398 - DNA, 20 bp, Artificial Sequence
  Synthetic construct
cccatgacgtttggaccccg

SEQ ID NO: 2399 - DNA, 20 bp, Artificial Sequence
  Synthetic construct
ctaccgggaaatcctcgtga

SEQ ID NO: 2400 - DNA, 20 bp, Artificial Sequence
  Synthetic construct
ctgatcgaccagatcgacag

SEQ ID NO: 2401 - DNA, 20 bp, Artificial Sequence
  Synthetic construct
agccggtccctttcccgtcg

SEQ ID NO: 2402 - DNA, 20 bp, Artificial Sequence
  Synthetic construct
cctcagttggcaaggtacct

SEQ ID NO: 2403 - DNA, 20 bp, Artificial Sequence
  Synthetic construct
cctctcaatcaaaataaggt

SEQ ID NO: 2404 - DNA, 20 bp, Artificial Sequence
  Synthetic construct
cgaaaatctgggctaagtgc

SEQ ID NO: 2405 - DNA, 20 bp, Artificial Sequence
  Synthetic construct
actctccaggcttaacacag

SEQ ID NO: 2406 - DNA, 20 bp, Artificial Sequence
  Synthetic construct
agctctcgaagactgctgtg

SEQ ID NO: 2407 - DNA, 20 bp, Artificial Sequence
  Synthetic construct
gtgtacaaattcctgcacca

SEQ ID NO: 2408 - DNA, 20 bp, Artificial Sequence
  Synthetic construct
tgacgcggaggcgtattcgg

SEQ ID NO: 2409 - DNA, 20 bp, Artificial Sequence
  Synthetic construct
aagtgatatgcactacagtg

SEQ ID NO: 2410 - DNA, 20 bp, Artificial Sequence
  Synthetic construct
caagacatcatggcctatcg

SEQ ID NO: 2411 - DNA, 20 bp, Artificial Sequence
  Synthetic construct
catctgcaggtacatagccg

SEQ ID NO: 2412 - DNA, 20 bp, Artificial Sequence
  Synthetic construct
tccctcacctgcaggccatg

SEQ ID NO: 2413 - DNA, 20 bp, Artificial Sequence
  Synthetic construct
atcacggaagtctcgtcctg

SEQ ID NO: 2414 - DNA, 20 bp, Artificial Sequence
  Synthetic construct
gcatgtgcggtcgcacaccg

SEQ ID NO: 2415 - DNA, 20 bp, Artificial Sequence
  Synthetic construct
ggcagcttacggcgacacat

SEQ ID NO: 2416 - DNA, 20 bp, Artificial Sequence
  Synthetic construct
tggtctacgtgccctcgcag

SEQ ID NO: 2417 - DNA, 20 bp, Artificial Sequence
  Synthetic construct
caccagcacgagcgtatggt

SEQ ID NO: 2418 - DNA, 20 bp, Artificial Sequence
  Synthetic construct
ctatcccgcccccttctacg

SEQ ID NO: 2419 - DNA, 20 bp, Artificial Sequence
  Synthetic construct
gctgggcgataaggcaccgg

SEQ ID NO: 2420 - DNA, 20 bp, Artificial Sequence
  Synthetic construct
gttattgcttgagtgatccg

SEQ ID NO: 2421 - DNA, 20 bp, Artificial Sequence
  Synthetic construct
agatattgaccatgagacag

SEQ ID NO: 2422 - DNA, 20 bp, Artificial Sequence
  Synthetic construct
ggagaccatcgagaccacag

SEQ ID NO: 2423 - DNA, 20 bp, Artificial Sequence
  Synthetic construct
ggtcaccgacgacccgaccc

SEQ ID NO: 2424 - DNA, 20 bp, Artificial Sequence
  Synthetic construct
tgaacaaacgctggtcaccg

SEQ ID NO: 2425 - DNA, 20 bp, Artificial Sequence
  Synthetic construct
ccttactctctccatgtcag

SEQ ID NO: 2426 - DNA, 20 bp, Artificial Sequence
  Synthetic construct
gaactcgatgagcccctgcg

SEQ ID NO: 2427 - DNA, 20 bp, Artificial Sequence
  Synthetic construct
gctcatcgacgactacggag

SEQ ID NO: 2428 - DNA, 20 bp, Artificial Sequence
  Synthetic construct
tccgccagacggtcaaccgg

SEQ ID NO: 2429 - DNA, 30 bp, Artificial Sequence; identical to SEQ ID NO: 393
  Synthetic construct

SEQ ID NO: 2430 - DNA, 30 bp, Artificial Sequence; identical to SEQ ID NO: 394
  Synthetic construct

SEQ ID NO: 2431 - DNA, 30 bp, Artificial Sequence; identical to SEQ ID NO: 395
  Synthetic construct

SEQ ID NO: 2432 - DNA, 30 bp, Artificial Sequence; identical to SEQ ID NO: 396
  Synthetic construct

SEQ ID NO: 2433 - DNA, 30 bp, Artificial Sequence; identical to SEQ ID NO: 389
  Synthetic construct

SEQ ID NO: 2434 - DNA, 30 bp, Artificial Sequence; identical to SEQ ID NO: 390
  Synthetic construct

SEQ ID NO: 2435 - DNA, 30 bp, Artificial Sequence; identical to SEQ ID NO: 391
  Synthetic construct

SEQ ID NO: 2436 - DNA, 30 bp, Artificial Sequence; identical to SEQ ID NO: 392
  Synthetic construct

SEQ ID NO: 2437 - DNA, 30 bp, Artificial Sequence; identical to SEQ ID NO: 701
  Synthetic construct

SEQ ID NO: 2438 - DNA, 30 bp, Artificial Sequence; identical to SEQ ID NO: 702
  Synthetic construct

SEQ ID NO: 2439 - DNA, 30 bp, Artificial Sequence; identical to SEQ ID NO: 703
  Synthetic construct

SEQ ID NO: 2440 - DNA, 30 bp, Artificial Sequence; identical to SEQ ID NO: 704
  Synthetic construct

SEQ ID NO: 2441 - DNA, 30 bp, Artificial Sequence
  Synthetic construct
gtcactgcagggaacctccaccatgggaaa

SEQ ID NO: 2442 - DNA, 30 bp, Artificial Sequence; identical to SEQ ID NO: 1584
  Synthetic construct

SEQ ID NO: 2443 - DNA, 30 bp, Artificial Sequence; identical to SEQ ID NO: 1585
  Synthetic construct

SEQ ID NO: 2444 - DNA, 30 bp, Artificial Sequence; identical to SEQ ID NO: 1586
  Synthetic construct

SEQ ID NO: 2445 - DNA, 30 bp, Artificial Sequence; identical to SEQ ID NO: 1161
  Synthetic construct

SEQ ID NO: 2446 - DNA, 30 bp, Artificial Sequence; identical to SEQ ID NO: 1162
  Synthetic construct

SEQ ID NO: 2447 - DNA, 30 bp, Artificial Sequence; identical to SEQ ID NO: 1163
  Synthetic construct

SEQ ID NO: 2448 - DNA, 30 bp, Artificial Sequence; identical to SEQ ID NO: 1164
  Synthetic construct

SEQ ID NO: 2449 - DNA, 30 bp, Artificial Sequence; identical to SEQ ID NO: 421
  Synthetic construct

SEQ ID NO: 2450 - DNA, 30 bp, Artificial Sequence; identical to SEQ ID NO: 422
  Synthetic construct

SEQ ID NO: 2451 - DNA, 30 bp, Artificial Sequence; identical to SEQ ID NO: 423
  Synthetic construct

SEQ ID NO: 2452 - DNA, 30 bp, Artificial Sequence; identical to SEQ ID NO: 424
  Synthetic construct

SEQ ID NO: 2453 - DNA, 30 bp, Artificial Sequence; identical to SEQ ID NO: 385
  Synthetic construct

SEQ ID NO: 2454 - DNA, 30 bp, Artificial Sequence; identical to SEQ ID NO: 386
  Synthetic construct

SEQ ID NO: 2455 - DNA, 30 bp, Artificial Sequence; identical to SEQ ID NO: 387
  Synthetic construct

SEQ ID NO: 2456 - DNA, 30 bp, Artificial Sequence; identical to SEQ ID NO: 388
  Synthetic construct

SEQ ID NO: 2457 - DNA, 30 bp, Artificial Sequence; identical to SEQ ID NO: 745
  Synthetic construct

SEQ ID NO: 2458 - DNA, 30 bp, Artificial Sequence; identical to SEQ ID NO: 746
  Synthetic construct

SEQ ID NO: 2459 - DNA, 30 bp, Artificial Sequence; identical to SEQ ID NO: 747
  Synthetic construct

SEQ ID NO: 2460 - DNA, 30 bp, Artificial Sequence; identical to SEQ ID NO: 748
  Synthetic construct

SEQ ID NO: 2461 - DNA, 30 bp, Artificial Sequence; identical to SEQ ID NO: 2441
  Synthetic construct

SEQ ID NO: 2462 - DNA, 30 bp, Artificial Sequence; identical to SEQ ID NO: 1584
  Synthetic construct

SEQ ID NO: 2463 - DNA, 30 bp, Artificial Sequence; identical to SEQ ID NO: 1585
  Synthetic construct

SEQ ID NO: 2464 - DNA, 30 bp, Artificial Sequence; identical to SEQ ID NO: 1586
  Synthetic construct

SEQ ID NO: 2465 - DNA, 30 bp, Artificial Sequence; identical to SEQ ID NO: 701
  Synthetic construct

SEQ ID NO: 2466 - DNA, 30 bp, Artificial Sequence; identical to SEQ ID NO: 702
  Synthetic construct

SEQ ID NO: 2467 - DNA, 30 bp, Artificial Sequence; identical to SEQ ID NO: 703
  Synthetic construct

SEQ ID NO: 2468 - DNA, 30 bp, Artificial Sequence; identical to SEQ ID NO: 704
  Synthetic construct

SEQ ID NO: 2469 - DNA, 30 bp, Artificial Sequence; identical to SEQ ID NO: 385
  Synthetic construct

SEQ ID NO: 2470 - DNA, 30 bp, Artificial Sequence; identical to SEQ ID NO: 386
  Synthetic construct

SEQ ID NO: 2471 - DNA, 30 bp, Artificial Sequence; identical to SEQ ID NO: 387
  Synthetic construct

SEQ ID NO: 2472 - DNA, 30 bp, Artificial Sequence; identical to SEQ ID NO: 388
  Synthetic construct

SEQ ID NO: 2473 - DNA, 30 bp, Artificial Sequence; identical to SEQ ID NO: 745
  Synthetic construct

SEQ ID NO: 2474 - DNA, 30 bp, Artificial Sequence; identical to SEQ ID NO: 746
  Synthetic construct

SEQ ID NO: 2475 - DNA, 30 bp, Artificial Sequence; identical to SEQ ID NO: 747
  Synthetic construct

SEQ ID NO: 2476 - DNA, 30 bp, Artificial Sequence; identical to SEQ ID NO: 748
  Synthetic construct

SEQ ID NO: 2477 - DNA, 30 bp, Artificial Sequence; identical to SEQ ID NO: 697
  Synthetic construct

SEQ ID NO: 2478 - DNA, 30 bp, Artificial Sequence; identical to SEQ ID NO: 698
  Synthetic construct

SEQ ID NO: 2479 - DNA, 30 bp, Artificial Sequence; identical to SEQ ID NO: 699
  Synthetic construct

SEQ ID NO: 2480 - DNA, 30 bp, Artificial Sequence; identical to SEQ ID NO: 700
  Synthetic construct

SEQ ID NO: 2481 - DNA, 30 bp, Artificial Sequence; identical to SEQ ID NO: 405
  Synthetic construct

SEQ ID NO: 2482 - DNA, 30 bp, Artificial Sequence; identical to SEQ ID NO: 406
  Synthetic construct

SEQ ID NO: 2483 - DNA, 30 bp, Artificial Sequence; identical to SEQ ID NO: 407
  Synthetic construct

SEQ ID NO: 2484 - DNA, 30 bp, Artificial Sequence; identical to SEQ ID NO: 408
  Synthetic construct

SEQ ID NO: 2485 - DNA, 30 bp, Artificial Sequence; identical to SEQ ID NO: 389
  Synthetic construct

SEQ ID NO: 2486 - DNA, 30 bp, Artificial Sequence; identical to SEQ ID NO: 390
  Synthetic construct

SEQ ID NO: 2487 - DNA, 30 bp, Artificial Sequence; identical to SEQ ID NO: 391
  Synthetic construct

SEQ ID NO: 2488 - DNA, 30 bp, Artificial Sequence; identical to SEQ ID NO: 392
  Synthetic construct

SEQ ID NO: 2489 - DNA, 30 bp, Artificial Sequence; identical to SEQ ID NO: 421
  Synthetic construct

SEQ ID NO: 2490 - DNA, 30 bp, Artificial Sequence; identical to SEQ ID NO: 422
  Synthetic construct

SEQ ID NO: 2491 - DNA, 30 bp, Artificial Sequence; identical to SEQ ID NO: 423
  Synthetic construct

SEQ ID NO: 2492 - DNA, 30 bp, Artificial Sequence; identical to SEQ ID NO: 424
  Synthetic construct

SEQ ID NO: 2493 - DNA, 30 bp, Artificial Sequence; identical to SEQ ID NO: 601
  Synthetic construct

SEQ ID NO: 2494 - DNA, 30 bp, Artificial Sequence; identical to SEQ ID NO: 602
  Synthetic construct

SEQ ID NO: 2495 - DNA, 30 bp, Artificial Sequence; identical to SEQ ID NO: 603
  Synthetic construct

SEQ ID NO: 2496 - DNA, 30 bp, Artificial Sequence; identical to SEQ ID NO: 604
  Synthetic construct

SEQ ID NO: 2497 - DNA, 30 bp, Artificial Sequence; identical to SEQ ID NO: 1249
  Synthetic construct

SEQ ID NO: 2498 - DNA, 30 bp, Artificial Sequence; identical to SEQ ID NO: 1250
  Synthetic construct

SEQ ID NO: 2499 - DNA, 30 bp, Artificial Sequence; identical to SEQ ID NO: 1251
  Synthetic construct

SEQ ID NO: 2500 - DNA, 30 bp, Artificial Sequence; identical to SEQ ID NO: 1252
  Synthetic construct

SEQ ID NO: 2501 - DNA, 30 bp, Artificial Sequence; identical to SEQ ID NO: 1623
  Synthetic construct

SEQ ID NO: 2502 - DNA, 30 bp, Artificial Sequence; identical to SEQ ID NO: 1624
  Synthetic construct

SEQ ID NO: 2503 - DNA, 30 bp, Artificial Sequence; identical to SEQ ID NO: 1625
  Synthetic construct

SEQ ID NO: 2504 - DNA, 30 bp, Artificial Sequence; identical to SEQ ID NO: 1626
  Synthetic construct

SEQ ID NO: 2505 - DNA, 30 bp, Artificial Sequence; identical to SEQ ID NO: 1627
  Synthetic construct

SEQ ID NO: 2506 - DNA, 30 bp, Artificial Sequence; identical to SEQ ID NO: 1628
  Synthetic construct

SEQ ID NO: 2507 - DNA, 30 bp, Artificial Sequence; identical to SEQ ID NO: 1629
  Synthetic construct

SEQ ID NO: 2508 - DNA, 30 bp, Artificial Sequence; identical to SEQ ID NO: 1630
  Synthetic construct

SEQ ID NO: 2509 - DNA, 30 bp, Artificial Sequence; identical to SEQ ID NO: 1631
  Synthetic construct

SEQ ID NO: 2510 - DNA, 30 bp, Artificial Sequence; identical to SEQ ID NO: 1632
  Synthetic construct

SEQ ID NO: 2511 - DNA, 30 bp, Artificial Sequence; identical to SEQ ID NO: 1633
  Synthetic construct

SEQ ID NO: 2512 - DNA, 30 bp, Artificial Sequence; identical to SEQ ID NO: 1634
  Synthetic construct

SEQ ID NO: 2513 - DNA, 30 bp, Artificial Sequence; identical to SEQ ID NO: 1635
  Synthetic construct

SEQ ID NO: 2514 - DNA, 30 bp, Artificial Sequence; identical to SEQ ID NO: 1636
  Synthetic construct

SEQ ID NO: 2515 - DNA, 30 bp, Artificial Sequence; identical to SEQ ID NO: 1637
  Synthetic construct

SEQ ID NO: 2516 - DNA, 30 bp, Artificial Sequence; identical to SEQ ID NO: 1638
  Synthetic construct

SEQ ID NO: 2517 - DNA, 30 bp, Artificial Sequence; identical to SEQ ID NO: 409
  Synthetic construct

SEQ ID NO: 2518 - DNA, 30 bp, Artificial Sequence; identical to SEQ ID NO: 410
  Synthetic construct

SEQ ID NO: 2519 - DNA, 30 bp, Artificial Sequence; identical to SEQ ID NO: 411
  Synthetic construct

SEQ ID NO: 2520 - DNA, 30 bp, Artificial Sequence; identical to SEQ ID NO: 412
  Synthetic construct

SEQ ID NO: 2521 - DNA, 30 bp, Artificial Sequence; identical to SEQ ID NO: 1165
  Synthetic construct

SEQ ID NO: 2522 - DNA, 30 bp, Artificial Sequence; identical to SEQ ID NO: 1166
  Synthetic construct

SEQ ID NO: 2523 - DNA, 30 bp, Artificial Sequence; identical to SEQ ID NO: 1167
  Synthetic construct

SEQ ID NO: 2524 - DNA, 30 bp, Artificial Sequence; identical to SEQ ID NO: 1168
  Synthetic construct

SEQ ID NO: 2525 - DNA, 30 bp, Artificial Sequence; identical to SEQ ID NO: 1647
  Synthetic construct

SEQ ID NO: 2526 - DNA, 30 bp, Artificial Sequence; identical to SEQ ID NO: 1648
  Synthetic construct

SEQ ID NO: 2527 - DNA, 30 bp, Artificial Sequence; identical to SEQ ID NO: 1649
  Synthetic construct

SEQ ID NO: 2528 - DNA, 30 bp, Artificial Sequence; identical to SEQ ID NO: 1650
  Synthetic construct

SEQ ID NO: 2529 - DNA, 30 bp, Artificial Sequence; identical to SEQ ID NO: 1651
  Synthetic construct

SEQ ID NO: 2530 - DNA, 30 bp, Artificial Sequence; identical to SEQ ID NO: 1652
  Synthetic construct

SEQ ID NO: 2531 - DNA, 30 bp, Artificial Sequence; identical to SEQ ID NO: 1653
  Synthetic construct

SEQ ID NO: 2532 - DNA, 30 bp, Artificial Sequence; identical to SEQ ID NO: 1654
  Synthetic construct

SEQ ID NO: 2533 - DNA, 30 bp, Artificial Sequence; identical to SEQ ID NO: 1273
  Synthetic construct

SEQ ID NO: 2534 - DNA, 30 bp, Artificial Sequence; identical to SEQ ID NO: 1274
  Synthetic construct

SEQ ID NO: 2535 - DNA, 30 bp, Artificial Sequence; identical to SEQ ID NO: 1275
  Synthetic construct

SEQ ID NO: 2536 - DNA, 30 bp, Artificial Sequence; identical to SEQ ID NO: 1276
  Synthetic construct

SEQ ID NO: 2537 - DNA, 30 bp, Artificial Sequence; identical to SEQ ID NO: 437
  Synthetic construct

SEQ ID NO: 2538 - DNA, 30 bp, Artificial Sequence; identical to SEQ ID NO: 438
  Synthetic construct

SEQ ID NO: 2539 - DNA, 30 bp, Artificial Sequence; identical to SEQ ID NO: 439
  Synthetic construct

SEQ ID NO: 2540 - DNA, 30 bp, Artificial Sequence; identical to SEQ ID NO: 440
  Synthetic construct

SEQ ID NO: 2541 - DNA, 30 bp, Artificial Sequence; identical to SEQ ID NO: 401
  Synthetic construct

SEQ ID NO: 2542 - DNA, 30 bp, Artificial Sequence; identical to SEQ ID NO: 402
  Synthetic construct

SEQ ID NO: 2543 - DNA, 30 bp, Artificial Sequence; identical to SEQ ID NO: 403
  Synthetic construct

SEQ ID NO: 2544 - DNA, 30 bp, Artificial Sequence; identical to SEQ ID NO: 404
  Synthetic construct

SEQ ID NO: 2545 - DNA, 30 bp, Artificial Sequence; identical to SEQ ID NO: 593
  Synthetic construct

SEQ ID NO: 2546 - DNA, 30 bp, Artificial Sequence; identical to SEQ ID NO: 594
  Synthetic construct

SEQ ID NO: 2547 - DNA, 30 bp, Artificial Sequence; identical to SEQ ID NO: 595
  Synthetic construct

SEQ ID NO: 2548 - DNA, 30 bp, Artificial Sequence; identical to SEQ ID NO: 596
  Synthetic construct

SEQ ID NO: 2549 - DNA, 30 bp, Artificial Sequence; identical to SEQ ID NO: 1241
  Synthetic construct

SEQ ID NO: 2550 - DNA, 30 bp, Artificial Sequence; identical to SEQ ID NO: 1242
  Synthetic construct

SEQ ID NO: 2551 - DNA, 30 bp, Artificial Sequence; identical to SEQ ID NO: 1243
  Synthetic construct

SEQ ID NO: 2552 - DNA, 30 bp, Artificial Sequence; identical to SEQ ID NO: 1244
  Synthetic construct

SEQ ID NO: 2553 - DNA, 30 bp, Artificial Sequence; identical to SEQ ID NO: 1675
  Synthetic construct

SEQ ID NO: 2554 - DNA, 30 bp, Artificial Sequence; identical to SEQ ID NO: 1676
  Synthetic construct

SEQ ID NO: 2555 - DNA, 30 bp, Artificial Sequence; identical to SEQ ID NO: 1677
  Synthetic construct

SEQ ID NO: 2556 - DNA, 30 bp, Artificial Sequence; identical to SEQ ID NO: 1678
  Synthetic construct

SEQ ID NO: 2557 - DNA, 30 bp, Artificial Sequence; identical to SEQ ID NO: 1679
  Synthetic construct

SEQ ID NO: 2558 - DNA, 30 bp, Artificial Sequence; identical to SEQ ID NO: 1680
  Synthetic construct

SEQ ID NO: 2559 - DNA, 30 bp, Artificial Sequence; identical to SEQ ID NO: 1681
  Synthetic construct

SEQ ID NO: 2560 - DNA, 30 bp, Artificial Sequence; identical to SEQ ID NO: 1682
  Synthetic construct

SEQ ID NO: 2561 - DNA, 30 bp, Artificial Sequence; identical to SEQ ID NO: 1683
  Synthetic construct

SEQ ID NO: 2562 - DNA, 30 bp, Artificial Sequence; identical to SEQ ID NO: 1684
  Synthetic construct

SEQ ID NO: 2563 - DNA, 30 bp, Artificial Sequence; identical to SEQ ID NO: 1685
  Synthetic construct

SEQ ID NO: 2564 - DNA, 30 bp, Artificial Sequence; identical to SEQ ID NO: 1686
  Synthetic construct

SEQ ID NO: 2565 - DNA, 30 bp, Artificial Sequence; identical to SEQ ID NO: 1169
  Synthetic construct

SEQ ID NO: 2566 - DNA, 30 bp, Artificial Sequence; identical to SEQ ID NO: 1170
  Synthetic construct

SEQ ID NO: 2567 - DNA, 30 bp, Artificial Sequence; identical to SEQ ID NO: 1171
  Synthetic construct

SEQ ID NO: 2568 - DNA, 30 bp, Artificial Sequence; identical to SEQ ID NO: 1172
  Synthetic construct

SEQ ID NO: 2569 - DNA, 30 bp, Artificial Sequence; identical to SEQ ID NO: 1691
  Synthetic construct

SEQ ID NO: 2570 - DNA, 30 bp, Artificial Sequence; identical to SEQ ID NO: 1692
  Synthetic construct

SEQ ID NO: 2571 - DNA, 30 bp, Artificial Sequence; identical to SEQ ID NO: 1693
  Synthetic construct

SEQ ID NO: 2572 - DNA, 30 bp, Artificial Sequence; identical to SEQ ID NO: 1694
  Synthetic construct

SEQ ID NO: 2573 - DNA, 100 bp, Artificial Sequence
  Synthetic construct
ttagctctgtttacgtcccagcgggcatgagagtaacaagagggtgtggtaatattacggtaccgagcactatcgatacaatatgtgtcatacggacacg

SEQ ID NO: 2574 - DNA, 62 bp, Artificial Sequence
  Synthetic construct
aatgatacggcgaccaccgagatctacacgctttatatatcttgtggaaaggacgaaacacc

SEQ ID NO: 2575 - DNA, 24 bp, Artificial Sequence
  Synthetic construct
caagcagaagacggcatacgagat

SEQ ID NO: 2576 - DNA, 46 bp, Artificial Sequence
  Synthetic construct
ccgagatctacacgctttatatatcttgtggaaaggacgaaacacc

SEQ ID NO: 2577 - DNA, 100 bp, Artificial Sequence; identical to SEQ ID NO: 2573
  Synthetic construct

1. A T cell comprising:
(a) a genetic modification or heterologous polynucleotide that inhibits expression of CBFB, MYB, ZNF217, FOXK1, FLI1, FOS, SATB1, IL2, ATXN7L3, MTF1, RELA, IRF1, BCL11B, STAT3, MED30, MED14, MED11, IKZF3, KMT2A, IKZF1, MED12, TAF5L, PTEN, IRF4, FOXO1, FOXP1, CTLA4, ETS1, MYBL2, TP53, MBD2, ZBTB7A, DNMT1, HIVEP2, KLF2, TFDP1, SMARCB1, MAF, FOXP3, GATA3, STAT5B, STAT5A, PRDM1, TNFAIP3, RXRB, TFDP1, CXXC1, NFATC2, MAF, IRF2, ZBTB11, JAK3, YY1, IL2RA or GTF2B; and/or
(b) a heterologous polynucleotide that encodes CBFB, MYB, ZNF217, FOXK1, FLI1, FOS, SATB1, IL2, ATXN7L3, MTF1, RELA, IRF1, BCL11B, STAT3, MED30, MED14, MED11, IKZF3, KMT2A, IKZF1, MED12, TAF5L, PTEN, IRF4, FOXO1, FOXP1, CTLA4, ETS1, MYBL2, TP53, MBD2, ZBTB7A, DNMT1, TFDP1, SMARCB1, MAF, FOXP3, GATA3, STAT5B, STAT5A, PRDM1, TNFAIP3, RXRB, TFDP1, CXXC1, NFATC2, MAF, IRF2, ZBTB11, JAK3, YY1, IL2RA or GTF2B.

2. The T cell of claim 1, wherein the T cell comprises:
(a) a genetic modification or a heterologous polynucleotide that inhibits expression of CBFB, MYB, ZNF217, FOXK1, FLI1, FOS, SATB1, 1L2 or ATXN7L3, wherein expression of CTLA4 is increased in the T cell relative to expression of CTLA4 in a T cell not comprising the genetic modification or the heterologous polynucleotide that inhibits expression of CBFB, MYB, ZNF217, FOXK1, FLI1, FOS, SATB1, 1L2 or ATXN7L3; and/or
(b) a heterologous polynucleotide that encodes MTF1, RELA, IRF1, BCL11B, STAT3, MED30, MED14, MED11, IKZF3, KMT2A, IKZF1, MED12, TAF5L, PTEN, IRF4, FOXO1, FOXP1 or CTLA4, wherein expression of CTLA4 is increased in the T cell relative to expression of CTLA4 in a T cell not comprising the heterologous polynucleotide that encodes MTF1, RELA, IRF1, BCL11B, STAT3, MED30, MED14, MED11, IKZF3, KMT2A, IKZF1, MED12, TAF5L, PTEN, IRF4, FOXO1, FOXP1 or CTLA4.

3. The T cell of claim 1, wherein the T cell comprises:
(a) a genetic modification or heterologous polynucleotide that inhibits expression of MTF1, RELA, IRF1, BCL11B, STAT3, MED30, MED14, MED11, IKZF3, KMT2A, IKZF1, MED12, TAF5L, PTEN, IRF4, FOXO1, FOXP1 or CTLA4, wherein expression of CTLA4 is decreased in the T cell relative to expression of CTLA4 in a T cell not comprising the genetic modification or the heterologous polynucleotide that inhibits expression of MTF1, RELA, IRF1, BCL11B, STAT3, MED30, MED14, MED11, IKZF3, KMT2A, IKZF1, MED12, TAF5L, PTEN, IRF4, FOXO1, FOXP1 or CTLA4; and/or
(b) a heterologous polynucleotide that encodes CBTB, MYB, ZNF217, FOXK1, FLI1, FOX, SATB1, 1L2 or ATXN7L3, wherein expression of CTLA4 is decreased in the T cell relative to expression of CTLA4 in a T cell not comprising the heterologous polynucleotide that encodes CBTB, MYB, ZNF217, FOXK1, FLI1, FOX, SATB1, IL2 or ATXN7L3.

4. The T cell of claim 1, wherein the T cell comprises:
(a) a genetic modification or heterologous polynucleotide that inhibits expression of ETS1, MYBL2, MYB, TP53, FLI1, SATB1, MBD2, ZBTB7A, DNMT1, TFDP1, SMARCB1 or MAF, wherein expression of FOXP3 is increased in the T cell relative to expression of FOXP3 in a T cell not comprising the genetic modification or heterologous polynucleotide that inhibits expression of ETS1, MYBL2, MYB, TP53, FLI1, SATB1, MBD2, ZBTB7A, DNMT1, TFDP1, SMARCB1 or MAF; and/or
(b) a heterologous polynucleotide that encodes a TAF5L, FOXP3, GATA3, STAT5B, FOXP1, STAT5A, PTEN or FOXO1, wherein expression of FOXP3 is increased in the T cell relative to expression of FOXP3 in a T cell not comprising a heterologous polynucleotide that encodes a TAF5L, FOXP3, GATA3, STAT5B, FOXP1, STAT5A, PTEN or FOXO1.

5. The T cell of claim 1, wherein the T cell comprises:
(a) a genetic modification or heterologous polynucleotide that inhibits expression of TAF5L, FOXP3, GATA3, STAT5B, FOXP1, STAT5A, PTEN or FOXO1, wherein expression of FOXP3 is decreased in the T cell relative to expression of FOXP3 in a T cell not comprising the genetic modification or heterologous polynucleotide that inhibits expression of TAF5L, FOXP3, GATA3, STAT5B, FOXP1, STAT5A, PTEN or FOXO1; and/or
(b) a heterologous polynucleotide that encodes ETS1, MYBL2, MYB, TP53, FLI1, SATB1, MBD2, ZBTB7A, DNMT1, TFDP1, SMARCB1 or MAF, wherein expression of FOXP3 is decreased in the T cell relative to expression of FOXP3 in a T cell not comprising a heterologous polynucleotide that encodes ETS1, MYBL2, MYB, TP53, FLI1, SATB1, MBD2, ZBTB7A, DNMT1, TFDP1, SMARCB1 or MAF.

6. The T cell of claim 1, wherein the T cell comprises:
(a) a genetic modification or heterologous polynucleotide that inhibits expression of MED12, FOXP1, PTEN, IKZF1, TAF5L, PRDM1, TFDP1, CXXC1, IKZF3 or TP53, wherein expression of IL-2 is increased in the T cell relative to expression of IL-2 in a T cell not comprising the genetic modification or heterologous polynucleotide that inhibits expression of MED12, FOXP1, PTEN, IKZF1, TAF5L, PRDM1, TFDP1, CXXC1, IKZF3 or TP53; and/or
(b) a heterologous polynucleotide that encodes NFATC2, MAF, ZBTB7A, MBD2, GATA3, MED14, IRF2, MED30, ZBTB11, RELA, JAK3, MED11, BCL11B, MTF1, ATXN7L3, YY1, ETS1, IL2, DNMT1, GTF2B or SMARCB1, wherein expression of IL-2 is increased in the T cell relative to expression of IL-2 in a T cell not comprising heterologous polynucleotide that encodes NFATC2, MAF, ZBTB7A, MBD2, GATA3, MED14, IRF2, MED30, ZBTB11, RELA, JAK3, MED11, BCL11B, MTF1, ATXN7L3, YY1, ETS1, IL2, DNMT1, GTF2B or SMARCB1.

7. The T cell of claim 1, wherein the T cell comprises:
(a) genetic modification or heterologous polynucleotide that inhibits expression of NFATC2, MAF, ZBTB7A, MBD2, GATA3, MED14, IRF2, MED30, ZBTB11, RELA, JAK3, MED11, BCL11B, MTF1, ATXN7L3, YY1, ETS1, IL2, DNMT1, GTF2B or SMARCB1, wherein expression of IL-2 is decreased in the T cell relative to expression of IL-2 in a T cell not comprising the genetic modification or heterologous polynucleotide that inhibits expression of NFATC2, MAF, ZBTB7A, MBD2, GATA3, MED14, IRF2, MED30, ZBTB11, RELA, JAK3, MED11, BCL11B, MTF1, ATXN7L3, YY1, ETS1, IL2, DNMT1, GTF2B or SMARCB1; and/or
(b) a heterologous polynucleotide that encodes MED12, FOXP1, PTEN, IKZF1, TAF5L, PRDM1, TFDP1, CXXC1, IKZF3 or TP53, wherein expression of IL-2 is decreased in the T cell relative to expression of IL-2 in a T cell not comprising heterologous polynucleotide that encodes MED12, FOXP1, PTEN, IKZF1, TAF5L, PRDM1, TFDP1, CXXC1, IKZF3 or TP53.

8. The T cell of claim 1, wherein the T cell comprises:
(a) a genetic modification or heterologous polynucleotide that inhibits expression of MED12, CBFB, HIVEP2, KLF2, MYB, FOXK1, ZNF217, IRF2, TNFAIP3, MYC, PRDM1, TFDP1, IRF1, FOXO1, ATXN7L3 or TP53, wherein expression of IL2RA is increased in the T cell relative to expression of IL2RA in a T cell not comprising the genetic modification or heterologous polynucleotide that inhibits expression of MED12, CBFB, HIVEP2, KLF2, MYB, FOXK1, ZNF217, IRF2, TFNAIP3, MYC, PRDM1, TFDP1, IRF1, FOXO1, ATXN7L3 or TP53; and/or
(b) a heterologous polynucleotide that encodes IKZF3, YY1, MBD2, IRF4, IKZF1, RXRB, RELA, ETS1, KMT2A, PTEN, JAK3, STAT5A, GATA3, FOXP1, STAT5B, or IL2RA, wherein expression of IL2RA is increased in the T cell relative to expression of IL2RA in a T cell not comprising the heterologous polynucleotide that encodes IKZF3, YY1, MBD2, IRF4, IKZF1, RXRB, RELA, ETS1, KMT2A, PTEN, JAK3, STAT5A, GATA3, FOXP1, STAT5B, or IL2RA.

9. The T cell of claim 1, wherein the T cell comprises:
(a) a genetic modification or heterologous polynucleotide that inhibits expression of IKZF3, YY1, MBD2, IRF4, IKZF1, RXRB, RELA, ETS1, KMT2A, PTEN, JAK3, STAT5A, GATA3, FOXP1, STAT5B, or IL2RA, wherein expression of IL2RA is decreased in the T cell relative to expression of IL2RA in a T cell not comprising the genetic modification or heterologous polynucleotide that inhibits expression of IKZF3, YY1, MBD2, IRF4, IKZF1, RXRB, RELA, ETS1, KMT2A, PTEN, JAK3, STAT5A, GATA3, FOXP1, STAT5B, or IL2RA; and/or
(b) a heterologous polynucleotide that encodes MED12, CBFB, HIVEP2, KLF2, MYB, FOXK1, ZNF217, IRF2, TFNAIP3, MYC, PRDM1, TFDP1, IRF1, FOXO1, ATXN7L3 or TP53, wherein expression of IL2RA is decreased in the T cell relative to expression of IL2RA in a T cell not comprising heterologous polynucleotide that encodes MED12, CBFB, HIVEP2, KLF2, MYB, FOXK1, ZNF217, IRF2, TFNAIP3, MYC, PRDM1, TFDP1, IRF1, FOXO1, ATXN7L3 or TP53.

10. The T cell of claim 1, wherein the T cell is a Treg cell.

11. The T cell of claim 1, wherein the T cell is a CD8+ or a CD4+ T cell.

12. A population of cells comprising the genetically modified T cell of claim 1.

13. A method of making a modified T cell, the method comprising:
(a) inhibiting expression of one or more nuclear factors selected from the group consisting of CBFB, MYB, ZNF217, FOXK1, FLI1, FOS, SATB1, IL2, ATXN7L3, MTF1, RELA, IRF1, BCL11B, STAT3, MED30, MED14, MED11, IKZF3, KMT2A, IKZF1, MED12, TAF5L, PTEN, IRF4, FOXO1, FOXP1, CTLA4, ETS1, MYBL2, TP53, MBD2, ZBTB7A, DNMT1, HIVEP2, KLF2, TFDP1, SMARCB1, MAF, FOXP3, GATA3, STAT5B, STAT5A, PRDM1, TNFAIP3, RXRB, TFDP1, CXXC1, NFATC2, MAF, IRF2, ZBTB11, JAK3, YY1, IL2RA and GTF2B; and/or
(b) overexpressing one or more nuclear factors selected from the group consisting of CBFB, MYB, ZNF217, FOXK1, FLI1, FOS, SATB1, IL2, ATXN7L3, MTF1, RELA, IRF1, BCL11B, STAT3, MED30, MED14, MED11, IKZF3, KMT2A, IKZF1, MED12, TAF5L, PTEN, IRF4, FOXO1, FOXP1, CTLA4, ETS1, MYBL2, TP53, MBD2, ZBTB7A, DNMT1, HIVEP2, KLF2, TFDP1, SMARCB1, MAF, FOXP3, GATA3, STAT5B, STAT5A, PRDM1, TNFAIP3, RXRB, TFDP1, CXXC1, NFATC2, MAF, IRF2, ZBTB11, JAK3, YY1, IL2RA and GTF2B.

14. The method of claim 13, wherein the inhibiting comprises reducing expression of the nuclear factor, or reducing expression of a polynucleotide encoding the nuclear factor.

15.-24. (canceled)

25. The method of claim 13, wherein the T cell is obtained from a human prior to treating the T cell to inhibit expression of the nuclear factor, and the treated T cell is reintroduced into a human.

26. The method of claim 25, wherein the T cell is a Treg cell.

27. The method of claim 25, wherein the T cell is a is a CD8+ or a CD4+ T cell.

28. The method of claim 25, wherein expression of one or more nuclear factors selected from the group consisting of CBFB, MYB, ZNF217, FOXK1, FLI1, FOS, SATB1, 1L2, and ATXN7L3 is inhibited in the T cell.

29.-41. (canceled)

42. A method of modifying T cells in a subject in need thereof, comprising inhibiting expression of a one or more nuclear factors selected from the group consisting of CBFB, MYB, ZNF217, FOXK1, FLI1, FOS, SATB1, IL2, ATXN7L3, MTF1, RELA, IRF1, BCL11B, STAT3, MED30, MED14, MED11, IKZF3, KMT2A, IKZF1, MED12, TAF5L, PTEN, IRF4, FOXO1, FOXP1, CTLA4, ETS1, MYBL2, TP53, MBD2, ZBTB7A, DNMT1, HIVEP2, KLF2, TFDP1, SMARCB1, MAF, FOXP3, GATA3, STAT5B, STAT5A, PRDM1, TNFAIP3, RXRB, TFDP1, CXXC1, NFATC2, MAF, IRF2, ZBTB11, JAK3, YY1, IL2RA and GTF2B in the human T cells of the subject.

43. (canceled)

44. The method of claim 42, wherein the method comprises:
a) obtaining T cells from the subject;
b) modifying the T cells by inhibiting expression of one or more nuclear factors selected from the group consisting of MTF1, RELA, IRF1, BCL11B, STAT3, MED30, MED14, MED11, IKZF3, KMT2A, IKZF1, TAF5L, IRF4, FOXP1, CTLA4, FOXP3, GATA3, STAT5B, STAT5A, PTEN, FOXO1, MED12, FOXP1, PTEN, IKZF1, TAF5L, PRDM1, TFDP1, CXXC1, IKZF3, TP53, CBFB, HIVEP2, KLF2, MYB, FOXK1, ZNF217, IRF2, TFNAIP3, MYC, PRDM1, TFDP1, IRF1, ATXN7L3 and TP53; and
c) administering the T cells to the subject.

45. The method of claim 42, wherein the method comprises:
a) obtaining T cells from the subject;
b) modifying the T cells by overexpressing one or more nuclear factors selected from the group consisting of CBFB, MYB, ZNF217, FOXK1, FLI1, FOS, IL2, ATXN7L3, ETS1, MYBL2, MYB, TP53, FLI1, SATB1, ZBTB7A, DNMT1, TFDP1, SMARCB1, MAF, NFATC2, MAF, ZBTB7A, MED14, IRF2, MED30, ZBTB11, MED11, BCL11B, MTF1, ATXN7L3, YY1, ETS1, IL2, DNMT1, GTF2B, IKZF3, MBD2, IRF4, IKZF1, RXRB, RELA, ETS1, KMT2A, PTEN, JAK3, STAT5A, GATA3, FOXP1, STAT5B and IL2RA; and
c) administering the T cells to the subject.

46. The method of claim 44, wherein the subject has cancer.

47. The method of claim 42, wherein the method comprises:
a) obtaining T cells from the subject;
b) modifying the T cells by inhibiting expression of one or more nuclear factors selected from the group consisting of CBFB, MYB, ZNF217, FOXK1, FLI1, FOS, IL2, ATXN7L3, ETS1, MYBL2, MYB, TP53, FLI1, SATB1, ZBTB7A, DNMT1, TFDP1, SMARCB1, MAF, NFATC2, MAF, ZBTB7A, MED14, IRF2, MED30, ZBTB11, MED11, BCL11B, MTF1, ATXN7L3, YY1, ETS1, IL2, DNMT1, GTF2B, IKZF3, MBD2, IRF4, IKZF1, RXRB, RELA, ETS1, KMT2A, PTEN, JAK3, STAT5A, GATA3, FOXP1, STAT5B and IL2RA; and
c) administering the T cells to the subject.

48. The method of claim 42, wherein the method comprises:
a) obtaining T cells from the subject;
b) modifying the T cells by overexpressing one or more nuclear factors selected from the group consisting of MTF1, RELA, IRF1, BCL11B, STAT3, MED30, MED14, MED11, IKZF3, KMT2A, IKZF1, TAF5L, IRF4, FOXP1, CTLA4, FOXP3, GATA3, STAT5B, STAT5A, PTEN, FOXO1, MED12, FOXP1, PTEN, IKZF1, TAF5L, PRDM1, TFDP1, CXXC1, IKZF3, TP53, CBFB, HIVEP2, KLF2, MYB, FOXK1, ZNF217, IRF2, TFNAIP3, MYC, PRDM1, TFDP1, IRF1, ATXN7L3 and TP53; and
c) administering the T cells to the subject.

49. The method of claim 47, wherein the subject has an autoimmune disorder.

50.-97. (canceled)
